United States Patent Application Publication US 2019/0183130 A1 - sequence listing, part 2

SEQ ID NO: 1 - DNA, 19352526 bp, Cryptococcus macerans (residues 1,935,254-3,870,506 of 19,352,526)
agctcaaagagaagactgcaaaggagctcggacgcaccccgaacatgtcaccgagcccttcgtcttcgtcatcgtcaacagaacgtagggagcgcggcgacgacattggctgactgcgtgagcagagtcggtcgaaagggaggaactgcgggaggctgggctgctgcgagctgcgagaagtattcagagacaggtcagcgctgccagtttcacagactagcagacggaggctgcattttgccgagcaggcggcatgcacctggagagaccaagaactggggcaggctgagtgggtcgggcaggccaaggggtcgtcgtcgaggtcggaagctccaaaaccggccccggatcgtctccggccagaagcgacggccgttcccctggacgccgacaatctctcgcaccgtcctcctcgacatagctcagcagcagtcagcacgggcgcagatcaagcaggcatctcctgccgccaactgctcatgtcgcgcaagagcaagccgagcccgatcctcattgtcgacaacggcgcgtcgacgatcaaggccggtttcgccggcgcgcaccagtatggcagcccaaagtacgtcgtccgcttgcctcactctgcgatctaagccttaccgactgacttccagtagtcgctcggcgagtgcaggctcttcccaaacagcctggctcggatcaagggcgagaagcggacgttcgttgcggacgagctcggctccgcgcgcgacttctcgagcatcagctaccgctcgcccttcgatcgggtgagtggccctctccagcctcttctcgtgcacagagacctgactggcgtcgtcttgcatctcgctcagggctacctcatgggctgggagacagagaagccaatctgggaccgagtctttgcgcggctggcggtacgtccgcgacgcgtcgcggtgcctccgcagttgacccggagcgagcctgacgactctgacttacatcttctcgtcaggttgtgccagaggcaacgtcgctcttcctcacagaggcgtacaataatcctccggccctccaagccgcgaccgaccagatggtgtttgaacattggggcttccgctccctctactgcacgacgcgtccgtctccctcctgcccctcctgcgacgcgagactagcgctgaaagctgctgatgctgtcccctctccgcctcacctcagccgcccagatcgtcgcgcaatctcctggcgtcgtgctgacggacgagctcgaacccggccggagctaccgcaccaatccagagtgcgccgtcatcatcgactctggctactcgtttacgcacgtcgtcccgtgcctgaacggtgccccggtccaggatgccatccgcaggtgcggcttccatatcttgccagcgagacgctggctatacgacgagacagattgctcactcgacctcggtgcgaccaggatcgacgtcggcggcaagctcttgacgaaccatctcaagacgcttctcagcttccgccagtacggtctgatggacgagacgcatgtcgtcaacgagatcaaggagacctgctgcgtcgcctcccgcaacttcatcagcgatctcaacctttgccagtgcgtgtcaaagttctcctcgccagactttgcccagatcactgacgccattgcattgtggcgggccgcgctcagacggcaccccgagcgcaatcatctgcgccaggagtatgtcttgcccgactttacctctgccgaccgcatgaagggcttcatcaagagtgggccgaacgcccgcaagaaggcgccgctggacccagctgccgcggttatcgaggctgagtgtgaagaggataaacagctgctatcgctcggcagcgagcgcttctcagtccccgagatactcttcaatccttccgacattggtgcgccgccgctcttctgccttatcagcgcctcctgtacgaagtttgacgacgacaaccgctcgcgaacaaaaggcctccaacaagccggtctcggcagagcagtcgccgactcgatcgctacgctgccgagcgagatccagggcctcttctggtgtaacgtctgtctgatgggcggcaacgcgcgcatccccgaactcgccctccggctgtcagtaggccggcgtgcgaggcggacgtccaagggcagcatgctgacttgtctggctgcgaacaaaccccaacagaaagagcgaactgcagcatctcagcccaaacgaggtcagccccaaggtgatgatcaacaaagagtgcggtccgagacgccttccctctcgcgctccttgcctggctctttgctccgctgagcacctcgttccgctctccaaccagcccctcaacgacaacgtacgttgccattcagcggctcttcagccaatccgagacgtcgagctgggcgcgcgaaaactttgcgcgctgcgccgtcactaagcaggagtacgacgagctcgggagcgccggccttgcgcggaagcggctgcaggttcgggactgggggtcgcgctgggcgggttgggacggttgagaagggagcggagccatgcgcatcaacagagcagcgagttaaagtgcgacaagggggcatgcaaaggggctgcaggacggggcaggcaggaagagcgcgtgtttgaggagactttacaggagcgcaggcaagagagaaggcactgtccggaaggggtgcgcgagaatgtgaagggaaaggtgggaagtagtggatgagggctctgagcccgtccggggtcgtcgtcgttggtcgtcgtcaatggccaaaggcccagtcggggtaagtcagctgctggccgtcgtgagagtgctgcagcggtggaggcggtgcttgcgagctgtgatgttggtgatagtgtggcgccagcgggcggactggcggtgcggtggatggcggcggctggtagatggccgcaccatgaggcgactcgtcataggccgggtcgaaaaggccgaggccggcgtcatgtgacacgagcggctgtatggcgggctgctgcgtgtatgaggggtagtacggctggccgtgcaggctgtcatcccgagtgggcaaacggtttggcctttgctggccctgctgcgacggtccggcctgcgagtacggctgttgataagcatacgcctcggcagctggcagcgggggctcggtgtagtagccagtcggcggcggcggcggcggtggcggcaggggctggtagcgggatggagcgctcatgctcggccgagcgtcgccggacgagggccgttcaccgtgagatgtctggcgaggcgaatctccatagtaggccattcgaggcgcggcggacaggggtggccctggaggaggagcgtagggagcgtaggccgagggctgctggaagacggacggctgtacactgtacgaagatggtaccggcggcggcaggtaggtggtcgtcccgggcgacggcgggtaaggcgacgcgttcaaaggcggtccgtagcctgtcggaagcgcgtaggaagccgctgcgccgggcggatcatgtgacggcggatcgagggagtacggcgccgagaatggtcgcgaatggtcgggctgtctcccttcaaacgagtgctgacctcggaggcttggccggcgagctccttcagcatagcgagggccgtcgccaaagtcggccgggttggcggcgtagggatgaaacatgcgtccagttcgcgcctggtacgacgccgacgccggcgcgctaccgaacattgtcgtcggtgacgatggtcgccgagcatacatgtcttggacgggcgccgccgggtaggcgtcctgatgcgctcctgatgggtagctcggcggcgagagcggccggcaggatgacgaggatgatgcggttggaggccgagtcgaagccgtgcccgggcgcgtcaacgaggacgacggccggcccgacgacgacttgatgtctattggcgaaggatcagacgggccggtagcaacaacagcaggcggctgtgaccgccggcgggacgatgaggccttcgccgccggcagaggcttcaaggcggcaatgtcgtcgggcgtcgtctcttgcatatcgggctcaccgctgtttagaaggggtaggccggaacgggagcaagatgtcaagttcagtgacgtcggcggcaacatctggtgccggaactgaccgataacgcaagaggccgtcgggaccaatctgaaccttgggcggaaaacggaagtgttccggatcgagctgtggatcagagagaaggaggcgtggatccgagcgagagagaggcggttccgtcaggatggttcgagctgaggcgccccgagcagggtgagcccttggagaccgagcgcaaacagacgtacaaattcgcctccaatctccagtgaagacagctgcggcgagcggaggaatcggacgacaacggacggtacgaggtcagctgttgaccggatggagaacgtcggccaaggtccgctcgcacctctggaagggtcgagggcgaccgcaaacgaccgcagagggcatcgtcgaggttgtagtagctgacgaggtgctgcgagtagccgttaatggtcatcgacattgtctgcgagagagggttgggcgccggcgcgtcagtgctgcagcgatgactgtgaagcttgcgttgcgatgaagccccctgagtgtcgaaagcgcacctttttaatgaggcccttctccttgaagcgaaacgacgccgtcagacttccgacgagctggcgctcgcgcagcttgcgctcgcgccgctcggttgccgtcagcccgtcggcagggactgcatcagcgacgagcccattcggagtcgcatgcaggccgccttgcgggtatgtctggccgagaccgccgccgccgctactactgctgccctcggctaaggagcggtgcgcgggcgtgtcggacggagtgagatcgtccggaccgagcgcaaagacgtgaccttgcgacggcttgagcggcgtcgtcggctgagagccggtcgttggcgaattggatggcgagggaagggcaccgccgctgacctcatgcattggagcagagcgggaggttggtcggccagtcttgacggtcaggcctgctgttgcgcttgccgaggacgaaggccgggagccgacgtccgagaacgacatgttcttgctggtcctgtcgcgcttctcgagctcgcggtagatctgtgggcggagcagataagggcgagggccgacgcaagccgaagatcggtagagacgtgcgcagcgggcgggaggcgtggtgcgtcagtgatccgtctgcggcggccgacggaaccagaggggtgattgctcgtgtacgaacgaggaagttgccgagaatacgcgacgggctccagacgagcccgtctgtccagcgcttgatcttactctcctcctcgtggaagatctggaacggcttgaccgggtcagctcgaggtcaaggcgcggagcgctgcggcaccgggaggtcgacgacgacggatcagtcgcgcatccaggacgcacgaatattgacccgctttggataagattcctttccttctcggtgaagcgacgcgagacgcgaggtatgatgccccggcgggccgcctcgagcaggaggagagcgtcctgcgtcgttctggagggcgaagagagctcgttcggatcagttcccagtgccgacgtcgagctcgtcggtggctgcctgcccgcggcgagaggcagcggcgaccggaggctcgctcgctcggacgcactcgacgatgccccggaagggcggctcagcgagctctcccatcgaacgacgcgcggaggacggcctggatgctgctgccggcggacgagtgttggggcgggtgatggttcgttggggtgtagtggaccggcagaggcgcctggtcgggctgggtgcggcagcccacgcaccacgccagcgagtcgggtcgaggagaaggtgaggagcggagggaaggagaccggtaaggttcagcccccaaagcggatttccaacagccggccagaccccgaccggcgcagccgacgaccagctgggcccacgacggtctggagcagcagccgctggtggctggcaagcgtcggcagagcaagaaagaggcgtaccagggctgaaagaggtagagagctcgcagcgtccgacggcggcttggacgagatgctggccgcggtggcgatgggcgggcgcggcgaaacgacggtggcacagagaggggacggtcgcactcgcacgcgcggggcagagggtggccctctagacgaaggaggtggggcggagcgacgggagctgctgctgctgttgctgctgctgctggtcgggaggacgaggacgaggacgaggtatggccgttcgccgcttgttcgccttggctctcctccgcagaccgggacgtgcttctgcttctgccggctctcgctcgttgttcgagcagggcttggtcgtcggctctcgcccggccggccgtcctgcctcgaccccgcagacggccgaccgccccggctcgtgcctctccatcggccggccggccgcgagggagcgactccgccaccagccaaaccccctcgcgctatagttcaagcgtctcgccatgcaggccgccgcgtgtgcacgcccggcccttcactcgccgcgcgtgccggccggtggggagccggcgatggctggctggtccatcaacgtcgaagcaaacgagagagcgagatcctcctctggcgctcgcaggagaaggagacgtcggcctgtcgctggaagtcggcgacagacggacaggtactgtaggaggccgagagggcgcgcgtcggtcgatgagaggcgcccgcacgccctcctgattgtctcgccgatccgagcgagtagggcgctccctactcgctcatctcgtcctctcctggcagctggcccgttgctatggcgtgcgcagcccgtctcgctccggcatcccgcgttggaacgccggcgtctgcctgccctcttggctgcgttactcgcctgtcagtaatcccgacccgggccggagcgggggcacgtctctccccttctcatcacctcatcctccctccacgagggcgcacgaagagcgccgcgcccgactgagcgcgtggtcctggctgcgggatccggtcaggttacatcgcagagtgtgggatgatcggggcctgtcagggccgacgtcggcctgactgtccgccttgtttcgcgaccgagccgagccgacctcggatcaccgcaggccagagctggaggacgagtcggcaggttgtcggcctgagtcgggaggttctcggcctgagtcgaaggagcgaggaaatgattgaatcggcgatttgctgcttccctcgtcgatcagcgcggtcagcagcgccgtcggtcagtggtgagttgcgaccgcccgcagacctggccaaccattccggctaaacgaccacagtcgtcggctttgacaagcacgcgcggtagtgaagacggcaggatttggcagccgccagttcagccggaaggcgcacggccgagggtcgacgatcaaagaacccctttcaccggcgccagcccgctcccctcgtcccacaaggtcggccccgccctgctcctatgccgcgcttccgaccatcaagccagtctctactattggagtcggaataatgcacaccgtccctcgcagcccactcctcgccgtcagtagacgatcaagcacggccgatcggtcagccgtcgcataatgaaagagaaaggagttgcggggccggaagtccgtgccgttagccctgtcgcacccctccgcccgccgagcgaaagcgcggatggtcatgccggcttggtcagagaggaccagtcgagcaaagtacgttccatcggccgtcggtgcgagggacctgcgcgtatggcgtcggacggagcggcagggcaaggaggaggagttgcgcgggtggtggcgccagtcgcgggcaggtcagaccgctagcggcgccaagcgtctctcgtagagttaagagagctgagaaggcgtaggagagatagagtgcgccggctcggcataagacggccgcgctgattgcgcagcacagccgagcgccagcaggggtcctgctcagcccgagcgggcgacaggtgttaaagtcggagggcgaagcgacggctgacctgagcgtgaggtgtggtgtatagaaagggtgatgtcggctggccagaagcagcgtgcgggcgggatgaggttgataggcgccttttgagacgaaggctcgttggtgccggggcaaaggggacgcgcctactcctcctcttcctcctcgatgaggttgtggagcggctgaccgtgaacataactcgaggtcgtcgatagcctgttgtgaatgaggaagtcagcttgaggacgacgatggcaacagagtgatgaccgacgcacgacgggatgctggctggtgggtcgagactatcgacgtctgcagcaggctcgtcgacgttcgtccgcggcgtgcccttgtcgaggtacgacagcaagtcgctgtcgggctcggtaaattcggacgcgaccgagtggcgttggtcgtcgtattcgccaggttgcgaggctgcgacggcggcgcgcagccgctccgacttggtcaggccgtcgccgacactggcgctgtcctctaccgagtcatcgccagcgatgtattcggcgcggtaggtgacgacagggtcgatgattggcccaaggtcgatgtagccggcagtagttggcgaggtggccgtgacaaggatggccggcgcgaggggcgaagggttcggatcgctgacgacggtactggcgccgagactgccgacttcagacgacgagccctcgtcgaagcgcgagattagctgcgtcggaaaggcctcgagcgggacgatctgctcgggcgtcggtcgcgatggcggaggcttcggggcggggacggccggcgggacgaacggcacttgagcacaggtcggcgagtggcgtatcggcgctcgctctgcagcctcgcctttggcggcgttcgagacaaagatgtctggaggcgagccgaagaggagtcagtcgaccgacgactcgctcagtaggtggtcagatacgaaagggcgcaccgatccaaaggtcgtcgcgcgacggctcccggccgtgcgacttggctacggcccggcgaagcgttccattgggactcgagctggcgagccgcatctcaaagcccatctgctccggatcaaacgggctttcgccctggatccgccgagcctcattcttgctcgtcaccctatgcgacgtgatgggcgaaagcgggcgcgggtcgctcgccgccttcttgaccttgaggtcgcctgccgagcgagacgggtggatcgcctgcttctgcggggtcgacagcgccgtcgtcgatgacgaggttgctggcgtgtgcgtcgtcgatgggtcgggcaaccgcaaggggtcggcgcgtcgcggagaagcttcctggcctcgcgacgacgtcaacgacagcagcttggtgggtcggccgcgcaggaccgaggcctcaaagtcctcctcccggtcccgctggctgcgtccgctgtgatcgctagcagtggcgatgggtacggctttttttgcccgcctggtcgagaagaggccgagcaagggctttttgacagccgtcaggcgggcctggtactcgaccggaacctggaaggagtgcagcaagttagcaacttgtgcgagaatcggaccttgcactcagatgatgcacaatctcctcgaagaagaagtaggcgccgtccgtccgagagtcggcatcgctctcgacggaaggctgtctcgttaggatgctcgccgcgggcgagatcggccggtaagacacctgtgagtgcccgtcagtcgtcagcctcttcgctcgccaaagagttaagcaaaggcctatcgagattcacgatggcccagttgcactcgcgtagcgtcgtgtcggagcggtccatccagccggcgctgataagaatgtcggcccagcagtcgacgaagggctcctcgatcaagagctcgccgacgtgacggggcctgaaggagggaggcgtagggttaccgtcagccatcgtttggatgagccgaggcgagttgacgtgagccagctgggacggaccgagtgttgtagtcgaacggcggcaggtccttctgcagcttcttgaggcgccggcggacctcttcgcggtctaaaggcaagcgcggggagagtcgagaacagtcgtcagaacatgaacagcaggggagggcagcactgggtctgcgacgcacgctcgggccactgctggatgtccttctcgatcggctgcgagaaggcgaggctctcgctcagcgtgttctcagtgcgcgagaatccggcgctggaaaagtcggtccaggtgagggtgtcgcgcttttcatggtgggcctttccaagtttacgaggcacaggagtcaacgagtgtcgcaaattgtagatgagcagagacgcgaagactgaccttgcgcgcgccctcagtcaggtcgaactccagctgcttactgatcggggtccgccggtcgcggctgacgctgctgcccttgccctcgacgctgccgagcgaggtcgaagacggagaggcgacgccgtcgaaaccgccattgaggaagtcgccccattgcttctcgatcagcgagcggaaggacgtatcggcctcgccatcgtcgtcgctctcgaacggcgcctcggaggacgcgatgccatcgccgccgctgccggccgtcggatagagcgccgggagatgagacggaagatgcagccgacgcttgaagtcgaccgcgaagcgtgggcccgacgcgggcaggatcgcgcttccggcgtgggaaggcacgaccacgcgctcgacccatgtgcgcagcacatctggccggccgggcccctcggcacactccatctcgctcggccagctctcggccgaccggaagagctcgggctggtaggcacggacgtctcgccgcaggccctcggccctgatcgtcttgacgcctggccgggtgccggtcagcgcgagactgcgctcggccgtcttgagcatggtagggtacccggcgatccaagcctggagacggccaggaagagcggtggcatgcgaggcgctggcgtgagcctgcgaccggatgaaagccaacaaaaggtgctccatcgcgagcgctgagcgtgagaaggccgcgtgcgtttcgtagacgggtgacgacggcggaattccaaacagcagcgggccaaagagcgagccgaggacagagggcgtctgcgagatgaggaccaacgtgggcgtcagctgagaagtaaggcgcgtgacggaaggaaagacgcacgcagccgccgacgttcgagtgagcagcgagacgcgagagcagactaaagagatcgttgacaataggttggagatctggcccgagagcagcggtgaatgcgtgccaatggacgagcgggtatgacgtagctgcagaagcatcgtggcagtcagccgtcgctgttcagcggtgagcggatcaaaagcagggaacggaccttgctcccgctcccgccacgtctggtagcgctcgatgtcgaccagtccacgtctgcggtcagctgccagtccgttcgacgacgagtccgtgctggcagtcgccgtagatgccggccggacctgcattacacgcgccagcacccagcgcagaacccatgcgagctcgcgctctccggcgaaagcgagctcgtctgaccaggcgcggtcgagcgcggcctgcggagtccctggccgaggttcgcttgagcggcagacatgaggggagcgaagtcagcaagaggatgacgccgttgtagaccgaacgacagagggacagaggctgacagcgtggcgaggaacgtctcgatcaggcccgcgatcgtcggagcgctgacgtcgagagcgaggctcgagaagagaagcggaatgtcgagcgcccgttggcagagcgcagtcgtcagcgcggcgaccgctgggccgacgtcggggagcccgagaacgacgtctggccgagttgggatgagccccagctggaggtcgtcggctgcccgaggtggcgccggcgggacgattgtcggcgagaacagccaccagggctgcgctagagggattggaggaggtttggtggaggagaggggaggcgagagagggagcgatgaggctgctgctgaccggctgacgagcgcgcgcgcgcgaccgagtacaacaaaggggcggcaggcgtcagcgaagagcggtgcgtgttgttcaaagcggaagacaccggctcgcacctgtgctcgctctttgagcgacctcgccagccgcctccgctgcggacccggccgagctcgtcggccagcgagagcccggccggggtttgatggtcgcctggcgaagagctgccagccctgccgccgaagctcccgtcggccgaagctgctgtagctgccgcgtgctgccgctgctgagcggccgctgccttggctgccttgcgttttgtcgtagagagcgaaaacatgaggcgtcgtgagagggtcgaggcgcgggggcgatgctggcgtgcgggacagagcgagcgagggaaggcgggcgagctggcggcgagctctcggcgtgaaagggaagggaagccgccgcaggcggaagtgctcctgctcgaagggccggctgcgagaggcgcactggtggtcgagtcagggagcgaagttgccaagcgagagacgaccgtcgtcgaggaggatgtcgatggatagcgagaggagggagatcgggtcgagggaaggccggcgacggcgaccgaggtgctcgcgcctgtcttcccgcgcgcgccacgtctggcgtttcggccccttttcgccaaaccgacgcccagccaccagtccttgttcgccatttacgtgccggggccgccgatggttcagaaggggagggtccaaagcaacatgtagtgatagcgaaggagatacgtagttcgaccatgaagaacagcggaacaagtccgacctacttggcctcggacgggttgccagtgcgggcggtcctgcaggcaaaggccggcgggaacagaggtcagtcggccccaagcgtcgaacccacagaagccctccagggttgacgcactcgtaattgtcgaggaaccacttgacgctctcttccatggcctcctcaaacggcgtgaaacggaacggctcgccgcccttcgagttgatgagcttgagcagcttggcgttcgacgccggcttgcggtgctggccgtcggccttggtcgcgtcaaactggagtcgggaatggcacgagtcagcaacacaggtcgacgctcttctgctgcggcgggagacgcacctcaagcccgcccgagtagccgatgtgcttggcgatcgccgtcgcgacgtccttgatcgaaatctcctcgtcctcgccgacgctgaggatgactgggtcaatctcctcgtctgagaacggatcggatgaggcgggcgtcagtgccctaaaacggggagagagggtgcgattatccttgacgtacactcgcgcagcgtccagacgaacagcttcgctaggtcgcggctgtagatgaattgacgcagaggcgaccccgatccaaagacggtgaagggcgtgccggcctctgcaatagcggaagagaggggcaactagtcagcgacgagccgtcggggcaaagtggttttggcgaggacgcactcttggcgagcagggccttgtgcatcagctccgggatgacgtgcgcgtcgccgatagtgtagttgtcgccgggcccaaagatgttggtcgggatgaccgatgtaaagttggagccgaactggtcgttgtaggcgctgcgaggggcgaggtcagcgagctgctcgaccgacgctgagtgcattcgtccggacgtactggttctggacgtcgaccagccgcttgccgtgcgcgtaaccgaagttgctctcgtggggcgggccgactgtgtggagtcgtgtaaggtcagccggtgctcgacgttgcgcggagagctaacgatgttgcaagaatgccacgcacggtggaccttggtctcgtcgagcgggtactcgaccttgtccggaaagacacacgtcgacaggcacgagacgagcttctgtaccttggcctggtgcgagccctcaaggacattgtcgttgatgagcaggttgtcgcgcaggaacgtgagcttgaggcgcatgttcttgaacaggccgccgacgagcgcggcgagctgcgaggcagatcagagtgaagggcagcggcgtcagcatgttggtcttactcaatcatagcgagacggaggacggacgtggatgacgtgggtcggctgatacttcttgaaaatcgcgtcgacggcggccgggtccctgcgcaggagcgacgtgcacaaaggaggcggcaaggtcagccacgctcgcagacaataagagaaccgcagagcaacagcgcgtcgcatctagcccgacgacaacagccgagcatggcctgggtagagcacaccctcgagcctgcccagttcgagctgctgagggcagccgtcctggcctggaaccttcgtgtctgggacgcggcaccaggcaggcgtctcctccctcgctgcggctgactcctcctgctctccaggcacctccggcaggcacccgatccaccatagccctattttcagggcagacccctgcgtgtacgcgcgaggaggccgatcgggactgaggcagacgcacttgaggtctccgtccttgctcgagaggaagatccactcctcgccttcgagccggccgaagcgcgagccgacaggctccgtctcgatcgtgtgccggagggccgagccgacgaggccggtgccgccggtgacgaggacgatctgcttggacatcctggagggcaaaatgagcgaaggagggaagaggaaaggtgggcgaggggatcgagatgactgtcaacgggacgcgacgagcgcccgccgaatgcgggtcgacgccacggccgcccctcgtctggtaacgtcgacctttgcccacctcgtctgcttggggccagtagataatcggtcggacgcctcgacggctatcgtctgatcagaccgagcttgctggaacgagcttgcgtcgaactcctggcgccctcaggtgggttgcaactacacccagctggctgctgcgtgcccctcccgccatggtcgccggcctgctctcgctccctccggaggtgcgtccaccttgccttgcatcttgaacagaagtctctctgacaggctgccgctgctcccccgcgcctgcagctcatctgggatatccatctactcgccttgtcaccggccctgccgctgacgtcggtccaaatcttccgccaactggcctcgccgccgccgtcgctcgccgcccgcttcctgctcgcctaccaccgctcggcaccgacgagcgacctcctcgcccgcgtcctccggcatggcgtgtgctcgctcgcgacgttccaggccgtcgaacggctctggcacgagcgtcgcgcgagaagcagcggcgcccccgtcaagctcgagatgaacgagctgccgaagcgcttcttccgtcacgtcctcgagcccggatcggagcctgccagggtccgcgacaacctcctaccgttcctcgactatctctttgccaactaccggccgtgcccgtcgtcgcacaagggctacccgctctgcggctcgatcaccgagcacccggcctcgcttccacttacgcgctacctgctcaacaagggcgccgacccgagcctcaaggacggctacgcagtcatcctcgccatcgacaagcgcgatctcgacctcgtccggatgctcgtcgagggcggctgggagaagggcggccagacgggcggcaagcggaagcgcgcagcaggggacgagggcgagcccgccaaccagagcccgaagcgacgcaagaaggccgaccgggtcgcaataacgagcaagatgcgtgcgtactctcatgctctctgccgccgttggcgctgctggaggcctgacgaagctgacagcgctacaccttgtactttggttccagtgtctgtctcgctcaagcggaagaaccaggcgattgtcgactacctcatggaccgcggcgctgttcccgacctcaagacgctcgcagaacttgggaggcgcggcagacggtagaccccagataggctggctcgttgcccttctcgtgggttctgcgtttctcgctcgcgtatggcctggcctcccgctgatcaagcccgcgtcccccttcagctaggaaagcagctctctttcctttcacttcatgctcatccgcacacctcggagcaactcccgcctgcccatctatcgccctctgctgtcgactacccttggccgcagcacctcatcgccggccagcctccgctcgcccgccaacatcacgactttgcgttctggatcagtcatctcactctctgcatatctctcacccacattcgtgtccccggttcgatctgaatgcatccggattctctcgagcttttggatgggctcccgtcgttcgggtgcctgcttccgccgccgctacacaggccgtcggcgatggccggatcgtcctgcaggccctacctctccgaccttgcctctgagtagcctcgacgctagtcacagagacgaccgctttagtccatgatcgatcctgtcaccttctgggcagaggagagcgaacggtcggaggcttgcgcatcggggaggagcaacgtcatgcgcgcgagacggaagctgagtgccggactcgacgtttcgacgccctccgcaacctcggaccaccatcttcttcttctctcgtcctctctttctctctcgctcaacatggcagacatcgacaacgacagcatcaacacgctggaggtcggcgtcatcggcggcggctcgatgggcggcgtgcgtcaggatgcgttgctcggcgcggctctccgatgcaccgcgggctgacagtgtcgctctcctctcgactcctgcagggcatgaccaagctcttttccgagcacggcgtacgttccatgctccagaagacccgacgagcacgctagagacgaggagcttgccaagaaatcccgagaggatcgggaccatattcgccctcgctgattgctcctcactcgtcgctcctgcagggtgtcgtcggcttctacgactacgaaaagtcggccgtcgaggctcttctcgaggcctgcaaggaagataaggatgtcccgaacggcaaggtccacggcttcacctcgcctgagggcctgctcaacgccttccgcgagggcaagccccgtgttcttgtcctgtccctcccgcacggcgacgctgtcgactcggtcatcgaccagatcgcgcccctcctcaaccgcggcgacgtcgttgtcgactgcgggaatgaattctgggaagtcaccgagcgccgccagaagaagatggtcgacgagaagggcgtggcctggctgggcgtcggcgtctctggaggctaccaggccgcccgccggggtccttcgatgagcgccggcggcgacaaggaggccttcgacaaggtgcgtcgtcgagtttgcgccgcagagaccgcgacaaggcgctgacctgtaccgccgtcccccaggtctcgcccctgctcgagaagtgggctgctaagcacgacggccaatcttgccttggctacatgggtccgggcggggcagggaactacgtaaagatgtgccataacggaatcgagcacgctcaaatggggatcatggcggagctctatgggctcctccgccatcaggccggcctcaccaacgacgagattgccgacatcatggagaagtggtacaacgagggcatgctgtccgacaactacctgatccagctcggcttcatcggcctccgccgcaaggacggcgacgacgccatgggccgggtcgaggacggcgtaatcgaagccatcgacgacaaggtcgtccaggacgtcgacggtacggagggcaccgggacctggtccaacatggagacggccaaccgccacatcgccgcgccatccttcaacgcctcgcacaacctgaggacgacctcggcccgcaagggcgagcgcatcaagacggccgaggcgctgaaaatcccgctgccgggccggttcgacgtcggcgaccgcgacgccttcatcaagaaggtgactggcgctgccgaggccggcatcttcgccgccttcactcagggctttgccgtgagtcgaccatgcagtgcgacaagctgttgcctaggcttgggctgacgctttcgctcgcgctcgcgcagctcatctcgcgcgtctccaacgagcagaagtgggacgtcaagctgtcagactgccttcggatctggaaggccggctgcatcatccgtagcggcggtatcacgtccttcctcgagccgatcatcaagcagcacgagaacctgccgaacccgctcgtcgtctctgagatcgctcaggagctcagccgcaactacgccaacctcaagtcgatctgcgcgatcgccatcgaggccgacgctgtcgcgccgacgcttcaggcaacgctcgagtacattaagggtttcggcaacaagcagctgccgaccaacttcaccgcgatgcagttcgtccaccgcttttattctccagtctcaagcgaggtgggacgaaggaggggccacagttgctccgacagagtgctcaaggccttgcgagagtggtgttacggcggaagaacttgcttcttggtcgcttcgttcaactaacgcttcctccccccccccgcgttgcttctttctcttcaccaaccttctcagaatggatagctttggggcgcaccgcttcgacctcaaatccgagcagaagccggatgccgtcaagggcgaccaccagtacgtctctttccgcgccggtccctgccgctgcgcatctggctgactgtttcccgtgcctcctcagcatcgaattcgtccctgcgtgaggctctgatcgccctgcaactcatgccgtcccgtcacggccgtcgacgctcctcgtttggcgtctccctcactgtatctgcctaggcccatttgtcttcactgtcttctttgcgctttcgaggccgctagcgttgcgagtgtcgccggtcgcaatgtgaacgagcaggacattgacatccgacagagacgtggtatgggaacagaaaggggggtgacggccgaagttgtcaggagacagggtgttcggtatgcatgttaggcgcgagtcgtggaggccaagggccgaaactgagggtcggacgcggtcgctgagatgtcgaagcgggagggagccgcctagacaagctgcagatctgcaagggaacgatcgtcgcgaagggggttagcggcaggcgaaagaagcgacgtgggggatggagggaacgcacaatttgacggcgagatgccgacctcgccgctgccgtcgatccgggcgacctgccaccacttgcccgagttgtcaaggacgtcaaagagctcgcccttggtcatcgagatctcctgcgggtcgtccgcgctggcttgatctgcgagagagggagagtcaggggaaagagggtcagccgagcacaggatgagcgacaacagtcggccgacgcacaggcatagagcgccttggcccgcttgaagctcgctccgccgggtgcggttccgccggtcgtgctcatcgcgctctgcgtctcgccgttctggtggccgcggtcgatgccgacgagcggcgactgctcggccttgaggtgctccgagctgatcccgccgccgagaccgccgctgccaatgccgccagtggcatagtagcctccgttgacgctgccgccgttgctgtgcgaagggttcatctcggcaatggacgacgaccggtcgcgctttgcgccgttgtagcccccgccggcaccgctcccgctgccgccgatgcttccgccggcgccgctcggcgaacccgagaagccgcggttgcccgacgggtggacgagctggttgccgtgcgagatggtcgggtggttgaggacgtgattgaggagcgtcggcttctcggacgttaggaacagaagccagacgatgtcgaccatggcgagtaggagccagccggcgccgaccgcctggtccttgctatcggccgagaagatgttgttgacctgcgggcggtgttcaaaagggccggcgaggtcagcatgggagagcgaggcaaggcatgatcgtctggaggaaacgactgacgccgccgaccgcaaagacgagcgcgaccgcgccaaagaccgacagctggagctggtatagcggcaggctgtcggtcgcgatggcgatgaagaagccgaccataacggcgagctggaggaagatggcaaaccactgcgatgagaggcggcgaagaggtgaggagggtcgtcagcttcttgcgtcgagctgcggctgagtaacggctggcgaaggttgacggacgagcgtgttgtaaagcggcagggaggtgagggccgagacgaccgccggcttcatggcctcgccgacggccatggcgatgaaggccgtgaaccaggcgacaacggcgattgaaaaggtgacgaggagcacataatggttgaggaacgggtctggtcgggagagcgaggttggttgagctgctggcgctcggccgaccgacgagacggcgtcctctagcacgacgtgcaggggcaagggacgtacaaaagctcatgctggtgcctctgccggacgccatgatcatgggctgtttgagacccgaagcgagagggaggatcggttggtgacgaggttgaggatggagagcccgggagccgagaggaggcgggctgctgggccgtgctgcgcgggggaaggctctttgagcgaaggtctgttcgaggggttgcgcttcggctgcgaggcggtcaacgtcggacgaggcaatcaggctgcttctgctgctatacggcgagctggtctgcgtttcgtggtcgatcgagggattggagcgaggtgcgcgaaggaagggacgccgtcgcggccgtcttgttggccgccggcgtgccgccgcaggaaagagagccggcccaagcgagcgcgaccgccagtcaccctgacccgacgccgtcatcgccaggatctgcaccttccgccgttttgatcagaggggcacctgctcaggacgtcactgccacaggcgacacggcgcgcacactcaaacgacatcctcaagcttcacaaattctggcggtcgcgagggcatcatgaaagatcattatccgcacgcctctatacaactggcaggtcggacgcgatgctccgtctagaggtccttgagcatctgcttcttgacgagctcgggggccttctcgttcgagaagaagctgaagcgacgagggtcaaaatcagcaaagggcgccaggcgaaatgaagcaggacgcggaccgcacgagtagccaaagtcctcgctcgcgtcgttgtagcggatggccttgtcaatcttgtcgagcttggcgaggtcgtcggtctcgagctcgaagatgccgatgttctccttcagccgcttctcgttcgttgacttgggcacgaccgcaatgtcgtggttggcgccccacgagaggacgacctgggcgggcgtcttgccgtactctgagaagggcaagccgaggggtcagcacgttcgaccttgactaagctggcgggcgaggagaggacccactcttagcgagctcaacgacgacggggtggtcgatgaccttgccttcattaccgacgctgaaggctgcagagcggtgacagacgttagcggggcggatctggtgtacctcctggccgctgcgacttactcgggttgaggtttccaaaggggctgtaggcggtgacggcgatgccctgcgactggagccacttgacgtacgtgccctgctggaggtacgggtggagctgcgaacagagaaaccggttcagccaggttcaaggtactcttgagagcacagggcgcacctcgatctgaatcgagtcgggcttgtgcttggccgtcttcagaatctgctcgacctcgctctggatcatgttggagatgccaatcgacttgaccttgccgccctcgagtagcttctccatcgccgcccatgtctcgttgagcgtgacgctcttgtcgatcagtggcgtgccgtccgggccgtggggcgacatctctcccttgttgggcagcatcggtgcaggcctgtcgagaaagaaaggcatgtcagcaacgcttaagacgtgttgctcgacagtcgacgggaggacggaccagtgaatgaggtagctgtcgaggtactcgagctgcaggtccttgagagtctcctcgagcgccttcgggacctcctcgggctggtgcgagttgttccagagctgtcacggaagcgcctctgtcagccgggcgtatcgctcggtgaaaagagaagtacgcatgctcaccttgctagtgacccagatcgagtcgcggtcaccgccccagcgcttgatgccgtttccgacctcgggctcgttgcggtaaatagcggcggcgtctggagatggtcggaagcaagtcaaaggggggcatcggcacgactgcgctttcgacgtgcgcgcgcgcctgtcgcagatccgactgaccgatgtgacggtagccggcctggagggcaagaagggtggcctcctcgacctcgccaggaggagcgagccaggtgccgaggccgatgaggggcatctagggtgacagggaggacgagatgcaagccggtcagcgccgctggcgagctcgagttggtagtcacctggacgtacacccttctccggctggagcgagttgggaagcttgatgctgaaaaggacgccgcgaggaggtcagcgcgcttcggtcgacctttgatccgccaacaccaaggaaggaaggcagggtgaggacgcacgtcttgtcggtcatggtcgccattctgccggtgaagccgtagtatctgggtgcggtggttgtagggagctgcttgagcgcagtcgacgtcaagaccgcagcgcgaggaagggcgaaggccatgactgcagagacaggtgggactgacgggtgaagggagaagggagggctgaaagggggtcgtccggccgaggcgacaggctggctggctttgaagggcccggctcgcgcgcggcgagacggtccggcccgggccgctcgatcgcacttgtcgttccgcaacaggcgcgagagggtcagacgggcgtggccccgcttgcaagagcggctgtcgttgggcgatgcacaccagagcggacgaggttcgcggagaggagaggtacgcaggggagtgagaagggaaggagagatgttggcggggcgaattgtgctgacgacagtagtcacgacgcaggcagccgtcgcgtgcccggtaaccctgttcaccgaccctaccttctactttgaacgcagaaacctcaggacgcggcgagtcggactgctcgtgagagcaggggccttcttgtagcccagtgaattaagactaaccatgcaaagcatctcgcctccttgtacgtctgatctggcattcttaccacggcccgtggccttgccgtgctctgctaaggggggggcaggggggtcagtcagggtcgcacctttccgacgccagacgaccagcgagccgcgtacgcacgagtggggctgcgagatgatgaaatggtacgagtacgggcccgagccgtgggggacgaccgggatgtcgtaggcggccgccatcgccgacaccttgagaagctcggtcaggccgccgagccacatgacgtcgggctggaggatgtcgatcgatcggtcctcgataagcttgcggaaaccgtactttgagtactcatgctcgcccgtcgtccacttgaccgagggcacggccttcttgagcagccggtggccgtcaaagtcgtccgggtgcaggcactcttcccaccagttgatgtcgatcttctcgtcgatgcagcgttgggcgagctcgatcgcatagggcacgttgagcgacatgtagcagtcgaccatcagcgggaagtctgggccgacgctctccttgtgcttccggaggaactcgatgttcttgcgcatgccgacgtggccctcggccggcgagtaaggcaaaggcaccttggcgccccagaagcccatcttcttgacgtcgggcggagtcgggcccgtgcagtagaacgggatctccttcttggtccggccgccaatcatcttgtagacgggctcgttccggagcttgccgagcaggtcccagatggcgaggtcgacgaccgagatggtcgcgagcgtgatgcccttgcggccgtaaaacatgctcgccttgaagagctggtcccagatgaggttggtgtcacgcgggtcctggccgacgacgaaccgcttgaagtggttctcgatcagccagcacgccggcgggccgccaaagccggtcgcatagccgacggtgccgtccgacgccgtcaccttgacaaagagcgagccgaggacgccgatgccccatgacgtccgcgaggcccggtactcttcataggccgacatcgggtttgagatcgacgtgtcaacgatccagtggccctgcggctggttgtgctgcgggcgggcggcggaggcggggcgaggaggacgacgacagggtcagcttgggtcgctcccagatggacgaccgtcaagagcgagcgtggtctactcacgtagtcgccgcctgagcccttcgccgaggggacgaacgactcgatcgaggcgatcgtcggccacgacttcttggtgccggctgcgatggaggcgggggggaggggctgggtctcagtcggggtcggcgcaacaggaaggaagagacctcgtactgaccgccgttggtcgtgccgttggtagcaggcatcgttagtcaggtctcagcgaggtcaagagagagcgagagagagaggggtgccagaggtgatggggagagggagggatgattggggtcggagctaatggcgagcagagaggcgggtgagtagtgtcagctgggccgctccctctccctcgccgcttcgaacctctgcccagggtgtcgtgctcacctgtcgaccggtacgagtgaagaggatgatgggtgtcgagagccaacagagggagcgagcgagaggtcgtccggctcggagggtcgggccgcctttgagccctcggccggccggcctaaagcgacgggccgactcattccgccgggcgccgagggccggctagctggtctggcagaggcacgctgctgcttgacctgccctcgacggtcgcaagcacgaccttgcgaaaagatcgcgtgtccttgatcagctagtagagcaagagggctgctctcgatggacgatatttgtcgagcgattgatgcgggatgcgggcggagagcgtcgagcagggggagctgacagggcgacccgtcgactggccagccgtgccgagcctgctgcgacggcccgacgctgaccctccgctgctcactctctctcaagggctgcatgccgcctgatggccgactcctctttcgtgctttcggcctcggcgtcctgcttttctctctcctccttcgttcgaccgagctagccggcggcgacggcggagggctgggcgagctcaaccaggcctcctccttcgagccagcccaggtcatctttggtgagccggtcggtgccaggagacaggcagctcggtactgatgtcagcttgacctgctcttgctcaaggtctcgaggtcggcaaggacgtgacgaggctggcccgacgacgaaacggcgagctcgagctggcaggtgcgtcggtcagccaggggacgtgcctcgacgctgactgacctgccttcgtccgcacctcgtagcgacagaagtgcatggaggcgtcgctgctgctcctcctgaaccgagcaccgaacctgaccgtcttccttcactccggcagtcctctttcgtcgcttggtcggctgctggcgggcccctcgtcggccgcgccgctcgagcgttctcgctacagcgaccctgcgacgtcggtcccctgctcgcactctgctcggactgcacactctcagactgacatcgcatgaaaggtgtcagtcaatctacaggccacctacagtgtccacgcgctgttgcatcgtgagggacctatcgctggcggcggcggcgacgacgacgactgccggatgatccctttgaccgacgaccaagcggccgacctgtcagtcttcctctcaccgaccggcggcttacgtgcgggactgaccctttctcctttacccagtctctctcgcttcttccggacgatccgcgcgcaagctggatccaggctcgacctcccgaggccgagcccgccgtgccgactcctgcccacaggcacgcttgacagctgtgctcgcttcgatctcgccgtcgttgtctctgtgccggcaggtcggggcctcctacccttctgcaatccttctcactctcagtcacgctgacaccaaggcccttcgtcctttggtagacttcgacgacctcgcgcgagagcgcttgacggccgcccttcgctcgagtcggttcgacccgctcagactcgttaatgcaccgacggcggcctgcatcggccgtggtctcctcaattccgagccggccggcgacgccgaacgtctgctcgtggtcgtcgatggtgatgccggcgggctcgaggccgacgtctccctcctgctgctcgaagacggcgtcttcgaggtgatggccgtccggcggatcgtctcgccgacgagggcctcgcttccaatcaacgtggctgccaccgtctcgagccttctcgacgcagtccctgtcgactcgctgctagtgacggtacgtctgcgagggttgcttgacagccgcaggactgcaagccgaacctctgcgaccttccccaactcgtagatcgtttacgccgggcacgagccaactgccgacgtcagtctcgccctcgagggagagatcagtctcgaagcgtacacggcagacacgacacctgctgaggcgattatggcagtgcgtcgcagggcatcctttaccaccgcccttcagttggcgttgacatcctgcctcgctgctgaccaccctagggcttgctctcgatcgccgacatgctggcagacgtcggcgaaggcactctggttggcgctggctgggatattctgccgctatcactcggcctcggcggggaagacgggctcgtgatgtgcgtccctgttgcaggcgatccttgcagtcaagagactgactggccgacggctgcctgccagacctctcgccaagcgatacagcttgacgcccctcgagcggtcgatcgacatcgagctgacagaccagacgaccgtctgcgtcgccctctacgcaggcgagagagctgcctcggccgacaactttctgctcggcagtctcgccttcgccatcgacttctcgtcgaacgatgcaagcgtcgagatccgtctcgcagtcgatgcacgtccattcactcttgcgtcatcccttccccgagctgaccctcgctccatccgtgcgcacagctcgacggcaacctgctcttaacgctacgcgaccagccgtccatgcgcttggaagtcggcccccgacgcgaccttgcctggctggcggctgtcgacgaccacttgcatcgagccgagaagatgacggccgaggacgaccggcaggccgctttcgctcagccccctcgcctccctccagtctgcccgccggcgttgactctgtctcctggatgaagccttgcaaaacggggcgcgggtgggtacaagcatcgggcggcatcgtattgagacagtgctagagatgggagggaggtcgtcatgcggcggtcgagtgggcaggagaaagtcggggcgacaagagaaacgcatcactcagacgcggtcagagtggtggtgaccggcggccttcgagtcaatcgtcggcgcgccagcgtgcgagccaatggtgccctccgaggcctggccgggcgccgaccggggctcgccctgaaagtggctgtggtggtgcgacttgtcgccgtgggtctcgccgtggaccttgcccttgaactcgtcgagcgagacggtcggcaggacggtcgactcgtggacgacgggggccctgcaagagtggaaacggcgtgtcagcggcaggagcgagcggcagagatggtcgcacgaggaggcaacgcactcgtggatcttctcgtggacagggatgacgttgtggacggtccggtgctcgtgcgtgtcgcgctggatgacgggcgtgatcgtctcgtgcacctgttcgaaggagggcgagcgaaggcgggtgggtcagcacggtagcgaggccgagggcgcaggggcaacggaggaaagacgcacatggtggtgctcgtgctcctgaacctgggcaccgaccgacgaggccgtgtgctcggtctggccgaccgtccgggtgtccttgtgctgcgacttgaggccctcgagcaggtcgcgcttctcgggctccatctcggcgcggacctccttggttacctcgggggcaacgacagtctcgtgctgctcccgctggtggaccgtgtccgagacaggctggacgcggtgctggtggtggtgctgcaaggcggcaaagaagggaagcaggtcagcatctggcctgctccaggtcacaaggcaaggcaacggcggacgtacgatgtgacgctcacggtcgacggcctcggccgtctcgacgtgctcgtggccgacgacggtctcctgggtaacaggggcagtcgtctcggtgcagacctcggtcgactcggccttgtcgctcttgtgaaggaagttctgcgaggcgggaggtgggatatatcgcgggtcagcacacgagcgggaaggcaccagaggcaccgctagagtcccggaagcaacgatgggcgcgactgaccttgacggcgtccattttgtgtagagtcgagggggttggttgggtgggtagtttggaggtgggtgagagatggaagagatgggttggatgagagtcgaaagggaggggagagatgctcgcgccttttcaagggccggcccatctcgtcctcatttcgcgtcccggtacgtcatgggtccggcgagagtttctccttgacgtggcgtgcgggtcctccggcctgcagctgcaagtcagctgtgaataagctgcagagagggccggcgatggtggcgggggcttctcgagttgaagcgacacgcgacgagacacgtcaggacggccggtcgccgtcggaggtcacttcccgcgcgcgtgaacagtggagcggcgatcgcgcagcagcaactggccgtaactgagggccgtgacggagggcgcgaggaccgacaccttgctctgccttgcttccgcccctgtcaaaactgcctgctgagctgaggaggccgagcagtacatatagacagccctcgacctgctgccagcctgctgctgtcgctacgcctgcgtccgcgcgctggtgttcgcaggcaggctgaccttcttaccaccacgatcgccctcgcactccggaatctcgtttccgctgtctttcatctcgcggccgccgccagagtctgggtcgccgttgtcgtcgtcgactcttcctcctctagcccgccatcacgtctggcgtgacgagcgcgacgcgcgactgatcatcgcgcctgctttccacgcccgtcctcgctggctcttgccctcttgctgctttgctgaaccagactgacctcgccgagggctgacgatcatcgcacgcgcgccgcaacagcggaaggggaccgtcgtcgcaggcgtcgccagcgcgagcgtgcaccggctgcgtcgtcgacggcaaccgtctcgtcgtcggggccggggtatcggtcaaagacgacgactttgtgtgacgccgctgcggctcccgtcgagcgactcagcccacccgagcggggccctgcacgtacgcccatgctacctggcgttggccggcccatcgccgccgggccgagcgtagcggaatcctcttgagcgctagtcagcgctgagctttctcatgctgcctgcctgcggatagggagagaaggacgaagggcgacggacggcatccctgcgaatgtctgctactcgccggtgctcatccgtcgcacaacccaaccgaagcctgacaagaggcgcgtggttcgtgcgttcgtcagatcgtcatcatatgcggacgtccgtcaagctcgcagccaaccggccgtcgccctctcccgtccggccgctgccgaaagctggctggtcgtcgtcctcctcgtccttctcgtcctcctcgctgccgtcgtccagcctcctcccggtagacagcccattctcttcgtcgctgacctcgagcgcctcgagcccgccgctcccattgtcgtcggcgccgggacccggcagcgtagggggcggcaagtcctctagctcgatgtcgtcctcatcgccgtcgtcgtcgtcggacgccgcgctgcctgaccgaacgacacgatgtgacggcagccgggggtcgacgtcctcgtcgtcgtcggcctccgcccggacacggtcgacgagcgccgccagacctgccgagagctcgatcgactgcccgtgcccgccgccgtcgccggtgatctcgcccggcgcgaacgactcggccgaaaggaacggggccgtgccaaaatcgtcctcggccgagagtggcagagtcggcactccgaggggcgctggtggagggagcggtggcggagtcgtcttgagtgggaggataagacggaaggcgtcctttccctgtgaagcgaaggcaaagtgaggaacaagttacgtcagggctaactcgacgcgacgatgcagggccagcgcaaagggacgcacgttcaggtaaaatcgccagagccgcttctcgcgccagaagcccatccgctcatagagcccgaggctcttgtcgttgtcggcctcggtctcgaggacgacctcgtcagcgccctgctcgcgcatctcgtcgatcgcgagccgaaggagttgttttgctgagcgcacaggggagagatcgattgacaagcatgctgtcagcgagtcagggctatgtcggaggacttacatgagactaaccgattccgcgctggcgccaggccgggtcgaccgacagcatcgcgaggtagccccgcatcgtcttgccccggtgcgactcgagcttgcagacgacgatgccgacggcgggcgacgagggctcgcctgctgggaaggcctgatacgaggtgtgacgggtcgggaaggaggatcagcagtcggacgactacttggacgcagggcgaggaggtcccggcgagagccgaggacgagcaggaagcgcagaacgcacgaggaaggccaggcttggcctgcaagcgatacgcaggcgtcaacagcagatccgactggtgtcattgaagcttcacagggctagcaagggcgtaccactgatgcagaaagtacctgcaggccgggcgaaaaggggagggacgcgctgcggggtcagcggcgaaggtccgggcgacgccccggctggcgctcgttgaccgccacttcaatcgcacctgtacgtgtagacctatgagcgattaaagcagctgaacaatcagtcagcgcaaagcactcgctttgtcaagcggcaggagaatgagcttgttcgcacggtgtaaggctcgctgagctccgtctcgacgagccggacgatgtgcgcgaggtcggccggcgtctgatcaaacggccggtagccgatttcgctcttgcctggcggcggcggggcggccatcttgacggaggacgacatgaacctctgacagagattgggagtggaggttgagatggaggaggcgagaggcggaagtcgtgctggtcagagggcggactcgttgtctcgtcgagcggcgcgtcgcgcgcaggcgcaggcgtcgagcggaggtcgggccgtcgcagcagtcagcctcgtcgcctcctcgcacgatggctcatcggatagcagcagacgctcgcggtaacgctcgatcgtctttccctgctcttcttcctcgtccagataggttgagggaggcagggcaggttcgcctggcaggactcgggagctagggttgacggcattgccagcctcactgtggcgccagcctcgtcaacatctccggcctgcgctggcgacctcgccttgccagctcactcgtcctgaccgtcaccagcctcgtcttccttcgtcgaccttccctccctttgccgctctctctcgcctcgttccacgctgccttcggtcgctctttcgttccagtcttcagccatgcggcttccgctgctgctcccgctgctcgcgctcgccctcccggcagtcgaggccgccctcctcgccattgattacggcgcagagttcaccaaaatctcgctcgtcaagccgggcgtgccgatcgacgtcgtcctcaacaaggattcgaagcgcaaggtccagagtgtcgtcggctggaagaaggacgagcggttgttcgggagcgaggctgccgccgttgttcgtccttgcagcctctcctccctttcgtcttacgcgcggctcgagggctgatgagctggcgtgcccccttaccgaccccgttttcagtccggccgatacccgtacgactcgttcccgtacctcaagccgctcctcggcgccccggccgacgcgacgcacgacattctcttcccctcgctcattcacccgtcgaatcgctcgctcgagttcacgctcggatcgagcccgcagacgcactactcggtcgaggagctcgtcggaatgcagtttgcctatgcgcgcgagctcggcgagcacatggccggcgagaagattggcgaggctgtcattgtcgttcctggctggtggggccaggccgagcgccaggctgtcaaggatgcggccgagattggcggtctccgcagcgtcgacctcatcaacgacgcgacggccagtgcgtgaccccgaaggctggcctttgccctctttgtgaccggcagctgacccttgtctccctgccgcgccccgctccctgctagtcgccatgaactttgcgatgacacgctcgttcccgacgaaggagcaccacctcttctacgactcgggcgcgctctcgacctcggcgacgctcgtctcattccacacgttccccgctgtccccgcatcgcccctgattggcaagagctccaagtacacgccggccaaggtcaacacaacgcatgttgaagtcctcggcctcggctttgacgacacgctcggcggccagcggctcgacgccctgatcaagcgcatgctcgtcgccgagtttgagacgaagctcggccggccgatgaccgacggtgacgacgagacgttcaaggcgctcggcaagattggcaaggaggccgcccgagtcaaggccatcctctcggccaacgcggatgccgcggtcggcgtgcgtctctcgttcgcgccctcgacttgacgcacacggctgatcacgatcccttgtgactcttttccagatcgagtcgctttacaacgacatcgacttccggacgcgcatcagccgcgagcagctcgagacggcggcggcccctctcatcgtcgagggccgcttctcgcgcccgatctcggacgccatctcgatggccaacctcactgtcgtgcgtcaccttgaacagtgactgagcgagctagctactgaccgacactcgtctcgacccgcctccccgtcgcaggctgacgtcgactcgctcatcctctttggtggaaactcgcgcacgcccatggtccggaccgctgtgaaagacttcatctcggaggacaagattgcccagaatgtcaactcggacgaggctgccgttctcggcgcagccttctacggcgcgactcagtcgcgtcagttcaagaccaaggagtaccgcgtggccgacctgacagcgaacggcatcgaggtggcgtacggcgctgagggtagccaggagcggacgatccggaccgagctgttcaagcagggcgcaaaaacgggccgtcgcaagtcgctcaaggttcagcggtccgacgatttcgcactcgccgccaagtactcgaccggcgtcaagcagtgagtctcaagcgagcttctctgtcccgacggtcccaattgctgacgccccgctttccgttcgcttgttcagaggcgagccgatcctcgacgtcacgctcaccggcctcgccgctgccgtcgcaaacgccacggccaacgcgacgagcccgtatgccgcgcccgaggtccgcgtcgtgacgacgatcgacgactctggcctcttccacgttgtcgaggcgactgccgtcttccccgccccgaacgtgacagccgaggacaagggcctcggcggcaagctcaagggcttctttggcgccaaggacgatgcgaagaaggacgtcaatgagaccgaggccactgcggacgctgttgctgctgcgaaggacgaggtcaagaaggatatcatcaagaagctcggccttgacttcacgtacggcgctgtcgcccccctgacccgggagcagaagtggacgtcgcgcgccaagtgagtcgacgacgccagacatccccgctgcgacacgcgctgacgaatgcgcatccttctctctgcaggcttcaagcaatcgacgcgctcgagctttcgcggcgccagcgcgaggaggccctcaaccacctcgagggctacctctaccgcttgcgcgacctgctcgcgcccgagtcggagggctcgctcttctggcagtactcgcagaaggaggagcgcgaaaagctgcagaagggcgtccgcgagggtatggcctggctcgaagaggagggctggcgggccgagacggccgccctgcgaaagcgggccgacgatctggcgtgagtcccagattcttcaactagccaccctcagctgggacgatgctgaccctgacaaaaccttcttgcagcgtcttcgagaagccggcccagttccgcaacaacgaggcgcggacccgcgccggcgcggtcgaaaagttccagcaggcactcttcgctggtcgtgcctgtacgtcctcctgccaactgggtgttcaggaatctcaagctgaccggtccttcttgccgcccccagtcatccagtcggctaaggcgaatgcgaccgaagacgcgaccgccggccggacgcccaagtttaccgacgccgagattgacaacgtccacctccacatggtcggtctcgaagagtggtttggcgagaaggccgacaagcagaaggacctgccgaccgaccaggacccggtcgtgacgacggccgagctcgactcgaagggcaagacgttccaggacaaggtgctcaagctcatcaagcgcaaagcaccggtccagcccaagccacctgtcgtcgtcaaggacgagccggctgcgaatgcgacgacggccgagggcgagccggtgctgggcgccgatgagcaggtcgtcgtcgacgaggacgtcccgccggcggagaacgccgccgcccgtgaggagaccggtgaggctgagctcgaggcggcctccaagccgggccacgctgaaggcgagctgtagctggagcacaccagcctcctatagatgtctgaatccctctcgctgagagaaagagagagaaacccgagccgtcgcgagaatgggcgagcatactgcgggtgagcggcgggagcaagcagcagcatgacgccgccgccgccgagagctcagccgcacggcacctccgcttgtctcccctccgaccgtctccctctcatcttgctccctcctcactacagccctctcaacggacccagctctgcccgccgctgcgatcccctctgcagaccaggaagccattcgtcgtcgaccgacgccccagaccgaggttgggcagtcgtcgcccgcatgagcttgcactcgacccggtcgaaccgctccggccggggcgtcagctatggcgccgccaccgacgccaatgtctaccagtgcgtcccgcccgtctgggtcgactgcttgcggacgtctccagaagctgaccagaccctgccctctaggtttgcgcttcggacagcgtgcgtgcctcagcctccccctttgacgatgagttgaggctgtcctccctccgaaggggggggggggcaagtgttgcgcaggcctcgagactgaccatcctcgccctcgctcgctccagctacctcgcctacttgctccgaccgagagctgtgccagaggccgagcacgacgatgactggccatcgtcgccgggcgcctcgtcgacggcagacgtcgctccggccacccgtggtcaccgtgagcgccttcagggcgcgctggcgagcgcgaccaagatgcccgactttacctccatctttatgggcggcggcagcagcggcaaggctgagcgggcgtacaaggtgcccgagaaggccttcaaggtgtttgacgagaagctccgggccatttttatgggcaaggacccgggcttccaggaccagcgcattcggcggacggtcgcgaccttctggagcaacacgaacgacccggcctacctgcgggctgtccgcgagaaccgcaaaattgaggagctcattctgatgatggtctcggtcgcgaccaaggagcttcagaaggaggtcaagcagctccaggacaaaaaggtcgagccagacttcgactggaagtacgagctcaacgtccaggtcggccagattgtaaagatcctgctcgagacggtccggtccgtcagctcgagctcgcctgacctgatcgccaagctcgactcgtacgcgagccagctcgcggcggcgccgatggccaagccgccgacggcgccggcctcgcctgcgacgaccaagccgcggaagctcacccgtgccggaccgagcacacggagcgaggtcgcgcataccaacagctcggacccggcagacatgccgatggtcctgactgtcggccggctgtttgccaagagtgaggtccagctcgctgacgacctcggcagcattcgggcgttctgcaccgagcaggcggccatgatcgacctcaagctctgcctcaagaacatcaacgccggcctacccttccccggccggcgcgaggacttcgacaccgaggaggcttggcaggcctggcgacaagccgagctctcgcaactctcacagctcgtcatggtgatggtccaggtcaatcccgagctcgcgaagcagaacacgtcgcgagacagcggcgaactccacgagtcgtcatcgtcgcaggtctcatcccagctgccggagcgattagactcgcttcgagggccgacggcgggtggcgagcatcgtggcgtaggcggctcggacggcccggccggcacctcccgcaacccgtcgacccgtagcacggcttcgacccggtcaaacgggcaggcatctgcgctcgacgacgtcgacgagaacggtgcgaatcagaccttcaccttcagcccgccgaatcctcgagcgtactaccggagactcatcgagcgctgcatcgactacgacctggtacgtccccccttgcggcgcctctgacaagggcgctcatgctgacggaaattcccgggtcaattcgcaggacgccatggcgactctgccagaggaccaagaggtcacgctcagcatcctgtcgacctcgcacctcgagctcacaaacgagtgtgcgatccgctggcggctcggccagccgcaccgcgcgacgacctttctcgacgtcatccgcctgcgcttcgagcgcgaggaagttccgctcgagtgcctgcctgaggccattggcaaggtcatgcaggaaatccgccggaacccgctcgagaactggatgtgggaagacgtgcgtccggcgcgcaaggcttctcgcgcgcgcctcccaagagctgacctccgaccctccttctcgccatcgcagtgcggcttcctgctccagatcctcagcacgctctgggaccacttcctccgcgtcctgcatttcgcctttgaggacattgcgaaagtcaagtacgccgacgtcgccgagccagtcatcatgctccaggacctctacgagacgggcctcgtcggtgcgacagagcaggatcgcagcaagctcgtcgagatcgtcgactcgatccggcaacgcgccttcagcctgtactcgatgaagacgaccgacgttttttccgaggacgcggccaatgaggtcgagccgctaatcaccatcctcgactgggtcgagaagcaggccaagatctacaagaagcgcttcccgagcacgctcctcgggtgattccgctctccgtgtcccttgatgcctcgcctcgtggactgacgcagagcgcgcgtcacagacacatcgacgtcgtcggcgcgatccttggccagcaggtcccgctcttcctgcaagatctcgaggatgcccacccacgggtcgtggctgcggcacttggcgcgcccggcgccccgcctgtcgtcgatatcgaagaggtgttccacctctaccgacgctcggtcgacatcctccgcatgcacgaccagcactgcccagagtaagccatctgttcgccggctcgagtcagactgttgatctctgctaatttcctgctctctccttttagttcaggcatcgagtttgacctcggcgccttcttcgagccgttcgcgcggcagtggctggcgacgacggacggcctgacgagtcaatgggtcgcagaggtgagggctgccgtcgtttcgatcgacgatcgaacatcgcgctgactcgcctacacgaaaccctggctccaggcgattcgggtcgacactgtgcgtgatgcgactcatcccttgatgctacctgctgctgacgccgtctgtcaacctgcagttcgagcccgacggcgacgcccgcaacagttcctctgtcgtcgacctctttggctccttttccagcgcccttgactttctctacggcctcgattggcccgacgagcaccaggaggcccagtttctcaccatcctggcacgagtgcgtgtcccttcattgactgcgcaatctaaagggacgattggctcacttgttccccttctccgtccttctcgcgcaactgcagacgcttagcaaggtcatggagcagtactgcaacacgatcgaggagctcttcttggctgagatgttcccccgcgtcgtcgttgacccgaacgtccccaaggagaacgcctggattgtcaaggccaagctcacgctgcaaggcgagaagaagattgagcccttcaactttgtccctgcggtgcgtggacccctgtcgcttctcttctgccgtcagatgaccaagtttaccttcctccccttttcccagtcctgcgtaaaactcaacaacatcgagaccgcccggaccgagctcgaccggatgtacgagaagatgcgcgtcgatgaggtgacgaagctcattgagagcgtgccgcctcagccgccggccaaggactctgcctcgcgcttcctcttcaccgtcaagatcgtcctcgccgaggggctcgtcccgcatgaccgcaactcgagtgccaagcttgacacctttgtgacgctgagcgaccagcacggccagcggctggccaagacacggaccgtgtacgagagcctcgacccgcgctgtgagtctctcagacgcttctcgagagccctgctcagccagagctgaccacgctgcgtcgctctcaaggggagcaagcatttgacatctcggtcgaaaagagcctctggctgatggcgaccgtccgcgaccgagcgcttgtcggcaagcacgacgaaatcggccgcgcctacatcaagctcgacccccagcgctacggcgacttcctgacacacgaggtctggtacgacctcgaagacaactcaggacgacttctactgcgcatcagcatggagggcgagaaggacgagatcggtttctattttggccgagcgttccggacgctcaagcgggctgagagcgagatgatccggaccttcgtcgacaaggtgtgatcccttgcctggctcctcttaccatgcgagattgtcgtcgggctgatcggctcttgtccccgtttagatgacgccgatgatccgccagtcgctcacgcgaaaggccatcaaggcgctcatcaagtcgacagccgcacctatcgactacaacgagacgctcaacaagctgacggaccgcttcaagtcagcgctcggctcatcgactgagtcggcgatccctctgccgaaggacgagcaggtcgcgccctcggtccttcggccacgcatcctgaccgacgtcgagatcgaggccgctatcaacgacctcttcgactactttgatgtcaaccaggcgacgctcagcagcacgctcagcctcgacgcgctccaggccgtcatgatgaagctttggaaggagatcctcacgacgctcgagggcctcctgatcccgcctctcagcgcgagctcgaccgacttggccccgctcacagacaaggaggtcgacatcgtcatgaagtggcgcgaggtgcgtctcgattggagtcgcgcctgccgtcgtcgggatgaggcgcgctgacctgcccatctgcctcccagtttctgcgcgactactttcacgctcaaggcgacgagaagggcctctcgaaagagacgctccacaacgccaagtacaacgagctcatgtcgatccggctgcactacgactggtcgacgtgcgtaccttttccggcagcgctggctcgtcgcagccactgatatgaggtacgccccttcagcgacgcgctcatggagcagtgcgttcgtgactcgcaagcgtccttgcgcaaggccggcacggtcaagcgcgccaagtcggtcttccagcagcgcaacctcggcacaatccgctccgccaagaaggacaagaagaaggcgagcgacccgacctcgtccggcaacgccgacatcatccttcgcatcctgcgtatgcggtgcgtctcggtcatcctcctcgctagcttcgcgttgctgaccttgcctcacctcgcctcgcctcgtcgcagcggaggagcggccgtccaagagttcatcgccgaacagatcgccttcaaggacgtcatccttaagcaggcttcggaggcagcctcccgacctcagccactcaagcggccgtctaacggcggcaaggccatgcgtggcggtagcggtggcgacagtctcagcatcccgcccgtcccctcgctgccggcgatccccgctctagtcgaccgcaaagcacgcggcttccagctccgcgacggttgagaccgacgctgccgtcggcccgcacttctccttcgctctgcttccagcccgtcatctctcgtcacctcttcacgtatcgctcaaatctccgcctcgagcgctcctgttgtacgcactgcacatcacccactcacgccataccctcggccctgcctctcggtctcgcaaacacaccatacccgccagcttcgcacgctgttcgctgcatacatgaccattctgacccatctcacgacgcgaggaggttgagacggtattgaaggccgcgcgggtcgagactggacgtcggacctcaagtgcacctcgctcgacccatcggccgtcagcgcgagatggcaagtctaagtgcatgaaatgctcatgctctgtgaatagtccagagctctacaaaggtgcgaggcgtttcggaagacgggagagaagggggaaagggaatgggactgtcggcggcggatctacgccttgacggcctcgcgccgctcgcgctcctggcggccgtggacgacgccttcgatctcgcggtcggctccgatggcgttgtcctcgccctcggtttcgtccatcttgcggaagaagacccaaatgcagatcatgccggcgacgttggcggcggcgatgccgacgaagggccagatcaggtgcgggtcgtgcagagccgggctgatgatctcgacgatggcgcttgagagagcggtggtgaacctgcaggagcgagggacaatcagcacggggaggcaggccatcacttcggactcctctcacgcacagcatgaacgcgtaaacgaggcccttcatgcgctggggcgagcggaggatggctgagggcgacagaggcaagcgtcagcgggcgatccaatcgaccatcgaggccgttgaaagaagagaacacgcaccctgctcgtagacggtgacgaagacgaagacctcgcccgcggccggcagcgcatagagcgggatctgagcccagatggagatgggcgagacgagcgcgaagccgttcgcgtcctcgcacccagcggtcgcctcgtagccgcacgggctagtctcgtagacctaaggtagacacggttagcaatccacacataacaaaggaacgagaggaccgccaccgctcacctgccactgaaggatcgcgctcgcgaccatggtgaggacgccaagggagaagccgaacctggagtgtagcaaaggcgagtgtcagccagcggcagcggttgaggggagcgaatgcacaagatggcgcatgacgcacaggatgcgacggatgggcgagaagttgatcttgtgcttgcgcagaagggggtaaatgccgtagttgaggattggaacgaggacgatgactgccggaagccagggcaaaggtgtcagagggagagattgggaggaatggcgagcggaatgaggctcactgcagatgctgttgaaattggaaaggagatcgttcggcgcgccgttcgtcgtcatggcggctcccatctgcagggacaagacaggtcagcctcgtcaagacaagctcctccctctcccttctcccgtccccgaaactagggcaagacgactcacagagttctgaaccgaagtgagtccactatccgcgaggttaaacaggacaaggaagaggaagagcttgcagctgtgagggggggagcgaggggaggatggaaagtcagctttagtgggcggatgacttggccgacaaaggaggccgaatacgcacgccttgatcgtccgcttcatctcgccgataaagtcgtcgtcccaggtgaccttgcttgggagcgagcccttcttctcgagaatctgcgacgggatggcggcgttccacgagcggcccttgatggccagtgcgctgacgcggccggcctggacaatgacgctgccctgagcagggaccttgacgatccgcttgtcgaggtagagaaggacggcggctgcgaaagaagagcgtcctggtcagggtcacgattaagagggcgaggcaagccaggatcgccacgtacgcatgatgaggtaggcaaacatagggacgaggtaagcgagccagaagccgatgcgcttctcgatgtacgtcgtgccgagctgcagaaaggcgccgacattgatgcaccaatagaagatcatgagcgcctgttggagagtctggccggggtcctgaataacacgctcgccggtcgggagtgtcaggatcgactggcgctgaatcggcgattggtcggccaggagcggagcgacggtcggcttgataaggcccgaggcggtcgcgaggacgaggatcgcgatgatgaagggggcgagaccgttaccgctctgaatgaccgcggggatggcggcaatgacaagaatgatgtgcgcgacgactggaaggacggcaagacgcagcatcagcccttgcgggtgacaggtaaagccggcgagagagacttacctccgacgagggtaccaatccatagcgtcttgtagcgaccccatttggtgtcggagatgatgccaccggcaatcgggatggtgtaggcgaggaaggtgaagagggtcgtgagagcggtggccgtctggaggccgaggccgagagcgccggcagtgccctgggtgtcgcccttcgcgggcgctccccagccgttgcctcccgggggcagtggctgctgaatgtaattgacttagagaagcggaggtaaagagttcgtcagtgagaacggtatcagaaaccgagtaagacctggtactgacagaaagggccctgaaatccgcgtcgatttctcgtcagcatcactggcttgaaactcccaatcgacctgtacacggggactcacgacgcagccgaagtacgacgcgcgctcggcaaactcaatcaggcagatcaggtaggccgtcttgggcagcttggcggcgacgagccggagcgacttgcgctcctcggccgtcggcagccggccgtcgacgtcggcgtcggtcgcgatcgaggccgccgtcgagtcgggcacctccttctcgtgcgggcccgggaagggcttctcgtgcttgggcgactcaggagcgaggacgtgaccggcgtcaggcacgccagacgcctcaaagtcggcgatggggtgagcggcaactgggagggcgtgcgaagcgaaggtcagcccgggaggcgactgggcagaaagcaggtgggggcaactaacccattcgtgggtgaaagtcgatgtccaggtagagtcgagaagagggagggattggtattgaggactcttgacgtaggcgactccggtaggtgggaggaggtggctcggtgctctagaaggagaggagaggaccgcggtgtggttggagggcaaggagactgtccggcccctggattttcgcccctgcttcgtccggtcaggcgccgggagtcaacgaagggccatgctggtccatttcccgagctggacggcaggacagacgccggcgccggccgagggcggggccgggacgagcaggcagggaagattgccattcgggcgagagaaaatgtcagctcgaggacgagaataggtcaacgtcgccgcctccaccctgtccacggccgaacaaggcgtcgtggcgtcggaggcgacggccggccgtcgctgccgccggcagcagcgctcgcaggctgtcgcctcgacaacaagagtgttgctcgagcccggtcgtcagcagtcgctcgatgctcggggcgcgagcggtgtaggcgtcagcagatagcctcttccttccacaactgctggtcgagctggtcgagcgcaatcgggatctgcggcaggggacccgacggtgctcctcagccgccggtctgcgcgagctgtcgaattcgtgaatgctctgattgcttacgcaagactcacgagcggggcgtaactcaatcacgacgaacggcggcacgcgagagagacgagcaggcgagcgctcaacgtcgtcggccggtgactgaggcacttgcacaaaccagcaagggagcctcctggtttcgctcgagcgacttgcctcagtgcgagtcgggacaacgagcagggctactgctcgagagctggcaagctgcaggcagacatcgtcgagccgagcagcagacgatacgctccgccatctcgaagcaggcaggactgcgaccccaggcggagccgactggagggtgtgcgaagcggcaagtgtcatgcagacatgagcggggatcgcgcgagaagaggactctgctcgccggtccctagctgctcggctcggccaccggcatggctccttcgcccgtgctcgctgccgtcttcttgcgctcctcacgcttttctatccgaccgagctcggcctcggccttcttgagcgacttgatctgccgttgccgctctgcggggaggaggtagggtcgcgcagcacgaaacggtcagcaacagaaaggcggagcgacctctggccctcccgacctgccgcctcgcacggtcggcaggagggaagcaaaggatactcactcgagcgaccagctgacccgcgcttgccggcactgctgagcgtccggtcgacgacggcctcaagctccttcttgcgcttgacaacctcctcggcccgggccttctccttcttcttgtcgcgtttgcgcaggtggggcgcaaaggccgcccggaggagcgcattatagcgctcggcgaacggcgggaggagcgacggcgcaatgtgcgtcgtcagcgacgccttgccgtcggtcgccttgacgacgcacgagtgcgatgatgacggcgctgaatccgacgtgtccatcgcatcgccgtccggctggccctggtaggtcactgcagacagcatcaggcaggtcgaggtcagctctgaaggagctgtgcgatgctgggctctgccgctgtcaaggtcgcgtgcgtgcaggtcctgacgagctcgagagagagccgagggataggacgaacatcgcttctgggtgatccagaccgagcccgactcctttgtcgactcaagcagattcttcagagcctccaggaactgccggaaccgaggggttgatcagctcggagggtcagcgaacggcacccctcagtcgacggggaggtgatggaggccgcacctgctcgttctcgaggacctggaccggcatcgtcgcggttcgaaacttggagcagaaaggggatccgagcgtaaaaaggttccagatgagcaagggtgcagcttgcgatgggacctatggcagggcgagggcgaggatgagagaaggcaggaagggaggacggaggttggtgctggctgggcaaaacgccagctgcagcagcgcccgcgccgactcgccgggccgcgcgtttggcgcgcgcgcgcgcgaaagggcgacgacgttgcgctggcagccgactctgctctccctccccttcaccgcctctctcatcgactcctctatcaagacctcggaaggagacccgcccacagccaggatgtacgtcggcctgcgatctggctgcttggctccatgtgcatgcgctgacaaccttgctcttcactcaggacgacgcttcagtcagtcgcctcccgtctcgtcgcgagctcggcccgagggacgacgcagccctgtcttcgaagctcgtcgtcctcaggctcgcctctcgcgtccatcgcagcaccagtctgggtgtagcgactgaccttcgcctccgatctttgctacgacctgcagagtcgtttcgtccgacgtggaaggagcgaagctctgtgatccgctcccgctctacctccacttgtataccgtccctttcctgtcgctctacccggtcctcgcctatgcctactacgtcaaggtgagtaggctctctagaggccagaaatgacgcagcttgctgtgatatcggtcgctgaccttacccctccccctccctctcccaccgcagtacgactcctggatcaagtcagaggagtggacgttcctcgcatgcgttgccctcggcgccggccacgccctgagcttcctcatcacccgctggagcatcgccatgcgggcccggatcacctgtgttcccgtcagtccaaatcctttgctggtcgcaagaatcgccgatcggacggccgcgtcctgcagaagttgacgctcctccttgcgctcgctctgggtgcaggccaccgacctcgcgacggccaagctcgttcaggtcgtccccaagctccaccgcggcaaaggcgagattgtccgcctcttccacaagcctgtgagtgggctagatcgacagtgtcttggcctcgccgctgctgctgccgccgctagcaagcatctggctgacatcctgctcccctcgctaccagtcgccctacgacccgtccaaaatgacgcactcattcatctatcagaaggaccactacacgtatcagtatgcgacgagcacgtttgcgccgatcccttacccggtcgactcgaacccacctttgtctgacttccagcactcgaagggcctgacggcgagcgccaagccctcgccccggtcggtgccgaccctgctcgaggagtacggcaagaatatctgcgacattccgatcccgcgctttaccgagctctttgccgagcacgccgtcgcgccctttttcgtcttccagatcttctgcgtcgccctctggtgcctcgacgagtactggtactattcgatctttacgggcttcatgctcgtcgtctttgagtgcaccgtcgtcttccaggtgcgcctcttctatcgctgcgctctggtctgactctgtgctaaccggatctgcccctctgcgcagcgcgttcgcacgctcaccgagttccggacgatgagcgtcccgccgtatatgatcggcgtcttccgtgatgacgcctggtccgaggtcatgagcgacgagctcgtccctggtgacctcgtctcgattagtgcgtcgccccggagtcaggccgcgcgcttcagcgagggccaaccgctgacctgccgtatcgcccttcagcccggaccaaagccgactctgcgatcccgtgcgacgtactgctcctctcgggtacggccattgtcaacgaggccatgctctcgggcgagtcgacgccgctcctcaaggagtcgatcgcgctccgcgagggcgccgacaagctggacatgaacggcgccgaccgcaacagcgtcctcttttcgggcaccaaggcgctccaggtcgagactggcaagggcgagaacggaaagccggcgcccgatgccggctgcctcggcgtcgtcctccgcaccggctttggcacgacccagggccagctcgtccggactatgctcttctcaactgaggccgtcaccgccggcaacctcgagtcgttcatctttatcggcttcctgcttattttcgcgattgccgcgagcgcctacgtctgggtcaacggcctcgccaagggcatgaagaagtcgaagctcctgcttgactgcgtcctcatcatcacctcggtcgtcccgccggagctcccgatggagctctcgatggccgtcaacgcctcgctcgccgctctctcgaaatatggtgcgtgatcctgggtctcgtcggacgtcgagatagcgctgactcacagccttcatccgctcggcagccatcttctgcaccgaacccttccggatcgccatcgccggccgggttgacgtctgttgctttgacaagaccggcaccatcactggcgaggacctcgttgtcgagggcatcgctggcgtccagtgcgtcccgcgtgcttaaggtatgcaccagagatgggtatgaaggctgacgaacgctgtccttgctcccgccagctcttccgaccccaagcagcttgtcccgatccaggagtgctccaaggagacgaccctgaccctcgctacttcacatgctctcgtcctcctcgaggatggcacgctcgttggcgacccgatggagaagacgacgctcgaggctctcggttggcagattggcaagggtggggctcggctgttgttcgccttcaaccttgtgcgctcgctgacagcggcgcccgtccctcgcaggtgacctcgtcacgcccaagaccgaccacgagacgccgcacaaggccgagattacgatgaagcgccgctaccagttctcgtccgcgctcaagcgcatgtcgaccgtctcgtacgtccccgacggcaagtccaagaagacgcttgtctcggtcaaaggcgcgcccgagacgctcaagacgatgtacgcgaccgtgcccgacaactacgacgagacctacaagtggttcacccggcgcggctcgcgcgtcctcgccctcggctggaagcacatggacaacatctcggctaacgaggtgcgcggccggctttgatccccgacgagccctcccctctggcttctgacacctctctcttgacctcggcagatcaaccacctcgcgcgcgagaaggtcgagggcggcctccagtttgccggcttcctcgtcttccactgcccgctcaagcccgacgccgtcgagtcgctcaagatgctctccgactcgtcgcaccgcgtgcgttgcaaataatccggccgtctcttgcgaccctcgttgactgtcgctctccttcttcctgcagtgcatcatgatcaccggcgacaacccgctgacggccgtccacgtcgctaaggaggtcgagattgtcgaccgcgacgtcctcatcctcgatgtcaaggaaggcacggcgtcggacctcgtctggaagtcggtcgacgacacgattacgattaacgtcgacccgaccgcgccgttcgaccagaagctctttgacgagtacgacatctgcgtcactggcgtcgccctcaagcagtttgaggagcggccgtcgtggatccagctcatccagcacacctgggtctatgcccgcgtctcgccctcgcagaaggagttcatcctgacgacgttcaagagtctcggctttacaacactcatggccggcgacggcacgaacgacgtcggtgcgctcaagcaggcccacatcggtgtcgctcttctcgacggctcgatggaggacctcaagaagattgccgagcaccagaaggtcgagcgcatcaagaaggtctacgagcagcaggtctcgctctcggcccgcttcaaccagccgccgccgccggtcccggtcgcgatccgtgaccagttcccggagctcgtcgccgcccagcaggcggccgcgactaacatgcaggtcgcccgcaaaaagaacccgatggagcgcttcgacctcggctcgatcaccgacaagctcgccgacatggacgacggcaccgagccgcccaagatcaagctcggcgacgcctcgtgcgctgcgcccttcacgtccaagctctcaaacgtcagcgcaagtgcgtggcccccccgcctaatgctgtcatcgctcgacgcagactgctcaccctgtgttgcaccctcctccccgcctgccagtcacgcacatcatccgccagggccgctgcacgctcgtcgcgaccgtccagatgtacaaaattctcgctctcaactgtctcatcaccgcctactcgctctcggttcaatacctcgacggcatcaagtttggagactaccaggtgcgcgaacacgcaggcgccctcgtctctccagcggcatgctgatccctcgctttctgctgtgccatcccccagcacaccattaccggcatgctcatgagcgtctgctttctgtgcatctcgcgcgccaagccgatcgacaagctttcgcgcgagcggccgctcggcaacattctcaacctctacgtcctgctgtcgattctcatccagttcgcgatccacatcgccgccctcctctacatgacggtcctcgccaagtctatcgagaggtgcgtctcgagctgctgctctgactcgtctgctggcttattcgctgacgctgcccaatacctatcgcagccggggcgacatcgacctcgacgcgagctttgagccgtgcttgctcaacacagccatctacctccttggcctctcgcagcaggtctcgacgtttgccatcaacttccagggccggcccttccgcgagtcgatctcggagaacccgccgctctactggggcctgctcggcgtcgtcgccgtcgcctacaacggctcgaccgacttcttccccgaggctaaccgctggcttcagctcgtcgacatgacccactcgttcaagttcaccctgacgatggtcatgctagccgactttgcaggctgcgccgtacgtccttccgatggcccggcctcgcgtttcgctactgaccctctgcttatcccaccggccttccagattgtcgagcaggtctgcaagcacctgtttgctgaccttgcgcccaaggagcttgtcacccgcggctcggagcgtcgcatcaagcgccgtgaggccgaggcgcgcgcgctcgccgagaagaaggaccagtagaagacgagcatcaagcaagggccgtctctttccgccaaaggcaggaaagaaaagggcaggcacgccaggcggcggtggccagacgaggtccagacgacctcagattcctctgcgcccccggtcgaccgcgacagcaaggctgatccgacgcagtctggctcggccctatcgcatgtccccacttgaacactgccagcgacctttctgttgaagcagccatgatagacgacccttacttgcaccactcgagccgcccctcgccgccgcccttgacgaggtgagccttgctcgtgttagacgcgagctcgtcgtcgtcggcttcgtcgcccggggtgacactgatgctcggcggcaatggtccgaggaacgacctttgcgggaggacgttgagctggacggcatctgagcgcgagaactgcaggggaggcggtggtcagcacgcttcttgcgcgagtgtagagagggaggatgcacctcttcgcggctgacatgcacctggccagagcctcgaccgcaggaggacttgtgcgcagcgccccggccgaggagaagccgcttgcgcgtgaagacgaagaggacgctgtcaaagaagccgacagcggagacggccgtggcggcaaaggctagaaagggctgcgggggcgacacgtcggtgaaggcagcatagatggcagagattgtcaagggcagggtgagcgtcccactgcgagccggacgagaagcgtgcgtcggtcagatcagggcagttcgaacgggcaagtgcagctgcgaacttgacgcactagacgagcggatagagctgcagtgcgacggcagccatccggccctcccggccgatatcttcgtagaggacgtgctgatcagctcggagttgtcgaggacaggagtgcgatcggcgcacctgccatcccgccggctgtgacgccctcgtgcccgcgcgaggacccttgcgaatgctggctgcgcttgccgaaggagaaccagcgtgtgcgctgctggccgtcaaagccctggcgccagctgtagacgcgcaggatctggtgagagggtgagagtggcaaaggtcagctcctgccgagatacaggctgcgaaagacgtaccttgacaagaatggtggcatagagcgccgagattgcagcgaggcagacaaggccgaccattggcccaaatcgaagccagagctgccaggagcgggcgccgacagttacatagcagccggctgggttcgggccgtagaaggggtacggcgagccctcgcgtgcgttgaggatggggccgatcgaaacggagagtatctggaagagggcgatcgcgccagatacgatccactttgcgtagggcgacgtcgtcctctggaggaccaggacgtagaacgtctgggcggcgacggcgaggttccagagcccgttgccgacgcactagtttgaggggtcgagggcgttggctagggtcagcacggctggccaccggaagagactggcacggggacgtactccgaaggcgtaggcaaatccttgataggagcaagcccgcccgtgatatgagtagtactcgacgatcggcaagacctcaagcgcaaagccgcaagagtaggcgaggtcggtgacgagcagcccgatgaaataagcgccgacatcggtctggacgaaggacttgatcgccctcgatcggggccgagcgtcggatgaccgaagcgcggagatctgttgggagcggccaggctgatcaggatgtgagacttctggcaacgttcagctcaagactcacagtcagatagatcaacagcgtggagaccgagagggccgatagacatgcaaaggcgacgatgaagctgtaaggaccaacgacggatgaagacgtcagcctcctcaccttctgttcatcagctcaagaggagattggctaaggcgcactgcttcccagtaacatcgcgcttgctccagtggacggccgtgacagcgaggtagctgcaagtgatcgaggctcgtcagcagaggagccagctggaagggagacgctcttgctcctcacattttggcgtcgacgacggaaaggccgaactcgagctgctggctcgccgaggacgctacgccgagggtcatcggcaggttgaaggctgtcggcatcgctaaggccgccatcttgctaggcaggagagctcaagaaggagcgtgaggaggagagagggcagggagcggcgagcaagtggtggtggtaaagggccagccgaaggaggagtgagggctgcccgtcgaagcccgtccctttcgatggcggtaatgattccgctggcgaggcaaaggccggagcttccgagctatcggcctgcggggcgacgtcggctcccctctcgctgtagacacgaggtcggccctccctgtcggcatcgcactcgaagagggggtcgaggaggccagagtagcgggcgcctactggaagagggaagggagaagacgtcaaaggaggcgcttgcgaactgttccaggcggcccgaaactacggccaggtcagccactaattgcggtcaagcgagcggtgggtgaaagggagtgagcgacgggccgacagctggcgctgcgcgtggaaaaaggggctggccgcaccgcctcctcgaccgggcggccctttagacgtcgtgcgatcgtcaaacgcgcatggaagggaaatggcatgctcagccgccctcggtcaggcgtcactcggcttggccaacttcccgcccttcttggcctccctgcgccgtttgcgccggtcgagcacgagctgacgctcccgggcctccctcgcctgcccaagctcggcttcggcatcgatcgatgaccggctttggacagcgccctctggctctcccacccagtcgtcgaaccacggtcggatgttcggccatccggcctcgtcggctccgggcacgtctgcatcgcgaatgacaattgccttgggccggccactcggcccaagggtcgtcaacctgaccgaaacgcacttgagaaacagcggcgtctcggccgtcggtcctggcgggctggctcctaaacgtggcttggatcgcgccttgccgtcgccttctgcggtgagatgcggcggcgttggcttgtagccgtacagctcgtcgccgacgatcggcgcccggagcgtgtcggcgcagaagacgcggagttggtgcttcctgccagtgacgggatgcagccggacgagcgagagcccgagccgctgcgagccgccgagaaaagcccacgccgtctgcgcttcgtagacggtctttgttgcggtcgacggcggtgcgccggtcgactctttggcgatgacgccaaactcggggacaggctggtggactgtcgccgggcctgggtgagcagagactcggcctgtcgacaatcgatttgcgttgacgacggcgacgaaggtcgtcactggctggctaagctccttgccggccgggaggacaggcggtcgatccgcaggtggtaggtagcgactgacaagtgcgtagtacgctggcaagagtgaagcggccgggcatgtcagccgaggagcgaaagtagcacgtgcagcgactcaagcgagcgcactcttgacaatctcgcgcgccttgaactgccggccgagctccttggccttggttgccgtcagtgcgagtacgaacgggccctcgacgtccttgtcgagccgatgcatcggccggatgccatgctcgccggtcgagccgcccactcggctgggcaggccgagccgctgcgcgagctcctctaagtactggtcgagcgtcgcttgccggtcgccctggaagaggtgggtgccgagggaaagacgatcagcctcaagattggcctcattgagctggagcagctcaccttgcgctcagcctgggcttggtcgtggccgccctgtgcgacgaggccgaccggcttctggacgacggcgatgccctgggcaatgacaaacggcctgttgcgtcattagagggaggtaggcaggcgggcaaccctgagctgacaagcaggcgggcaggcaacctggacgcaccggcgagtgatggaggatccgcagcggctcggcgccgtaaggcaggccatgcgggcgacccggtccgaccgtgagccttacgagcgacctagagagcgccatgagagaccgaagggcgggtcgaggtcgagcagcagggaccgtcgtgcgtccgcagcaggagcttcgcccaacccgcgccgcttgctgattcccttccgaccacgacttgcgactcagccgcggtcaaacccatcatgcacgtcgtccagggttgctttactggccactcgacgcgctcgatgctgacggccctctgatggctgggtgggagagcccgcgctgaccgggctacccgcgctcgatgaggcctgcgggtcaaccccgcctgaccgcctcgtcctgccgaccgagctccgtctcgacccctctctgagtgtctctctttgcagtcgctcctaaagccgctcgccatcgccctctactcgtcccgaaatacatccccaacgctcgatagcgcccgccgatggccaaagctcgagcgtaaccgagacacgacgtcgcgccgagcccggcgcccaggctcttgagccgcggtgcatcgctgccctccgacccctctaggccctcattgctgacctctctgcgctgtagaatgcaggcaacgcgcttggggatgctggccacccgatagccaacccagcatccgaacttcgtcgccgctagccactcctgtgtcactcgacgtctcgtccatcgggtctcggacgacccccttgacaacacaaggctcctcaacaggcgcatgacgaccaggcgagagagggatgagggagagatcaggaaggaggctggggaggattctcaattgcgaacgtcgagagccaagatgagcgcggcgcatctgcagcgagtcatctgccgggggtacatcctctaacagcactccgggtctagcgcagcgaaaacgagacttcgaggtcagccagacgtcgctcagattggacctgcgtgggcagggcgagcgaagggaggatcgcatctcagaaaccgtcgctgacgcggctcgagacgaccgaaccggagacgtgctctcgttgcagttgcggcagtagagcgtaccctctgccgccgtgcctgcaacatcttagtgcgccatctgtcagcaggcgaggacttgacgagcagcaactaagggaggagaagcaatacaaagcttgcttgtccgaagcgccatggcagtcgcagcaatcgtcgttgaccgccgagcagagaacagtctggttccctcgtctccgaccgcggatcatactggtgaccccggcgaccttctacgactttggctggccgtcggcacctcgcaagcaaggtggacgaatgtcgtcgatcaatgcagtctcaacctagaacgggtctgagagcagcagacctcaatatcgagtgagcgagtacgccgacagacaaccctcccgcctctttggctgccaccccctctccgccccccctttgccctctctgggaaacatgctttatatacgctgcttttgtttcttcatgcatcaagtcgcttgcgacgaaggattgtatagtttaggtggttagagcgccagcttgtggtccacctcaatacgctggatacccgtgttcgagtcacggtacgatcactttttgccagtttcatgttcgtctcctttttgcctgtgcctctccttctgctccgcctgtgctctctctgccagtcctgcgtttgacttagccctacgtcgcagccgagctctccaccctcctctgatcaggtctgagcgagttgtccatgcgattccgagatgagtttgcactggtcacccgtcgaacctgcagggaagacgaggtgcgaccgcggaaggtgaaggagatgttgcagctcgcccggaccgcatgccagtcgaggctaacgggagcgacgccctcatgcgcattggtctcagccttagggcggcgttcgcggacgccggcaagtcttcctgtccacgcctcccgccgttcttcggacgacccctttcccctctcggcacggtatggaagcgtggcatgtctatgaatcggagcctcgttaagcctctcctcagtagcgcccgccgtcccggggctgggtgcctccgtcccggccagcggcgacgagcaggctctggcgggcgccgtccgcactcgtcccctttggcaagttgaggagcgagtccctcgtctggccgagcgtgaagaggctctgacggtaagccacttgctcagtgtagtactgctcgagcttgatctggttctgctcgcgcgtccgcttgtggataaagaaaaggccgatgccggtgccgacgacgagcaggatgatgccgagcgcgacaaggacgtagacccagatggcgggcgtccggggcgcaaacgacggcgggacgcagaagccgctccggtcacagttgtacgaagcgcacctgagacgacaggcagttcagagggtcagcttgccgctaagagagggtcaaaagactccgccaaacgcactctttgtcggctgagcaggccgagccgacaaacttggtcgcgacgcagagcttgctggtcccgtcacagtagccgccgaaccggcagctggtgagggcaagaggagaaggaaaagcagatgggcgatcagcatgtggtctggcccaaagcaccaaacaacgcccgaagggcacgcacttgtctcggctgcggatgtcggggaactcgtcgccctcggtcgaccagccaacaaagacgaggttctcgagctcgcacggctcgccgaccgtcacgttatcatagaagcagacctggttcaggcaaatcgagccgttgacgttgagcgacgacttgagctcggcgaggttgggcggaggcgagcactcgtctgcgaaaggcgagcgtcagccttcgagttgaaggggaggcgaaggggaggctgcgcgagctggaggctagacgcaccgtcgcggtcgagctggcaggcctcgcccggcccaacctgcagctggcaggcgtccatctcgtccgggcagacgaagcccgtctggcagcgctccggaagggtgtcgtttttgtcgtagccaaaggggaactgttggagaagaaggagtcagcacgggcagggctgcggcggctcggaaaggacaagtggcgcgcgctgcacgaccggtgacgagcgagctgcccgccccagcagcctccagcccacaaaacccagagcctcaggctcgatttggctcagcaggagacttgcctggacggcccgagcagtcctgcttgaggcgtcgccccaccgaactttgtggcagtcgaccgccttcgccacccctctgcacgacaaaggaggcgcgcgacgcgcgccgtggcggggaaagcaaggagggactgacctcgtcccgccggcagcccttgggctgacagacattgtcctggttgcagaaggcgtcgggtgtgcagccgctgttaagcgagtaggtcgcgacgtcgaggtggacggccgcgtacctgtgggcaagaaagggatgagagaaggcgtcagccctcggaaagcggcgagggagcataagcctgccaacggcacccactcgcagtagccaccgacgggcgccttggctgcccgtgccgagccggtgacgacgagagcaaacgagaggaatgaagggaggagcatgctgagaggattgggcgttgacggtcgggagagccctcgaggtcgattcgagctgcgcctgctggggcggcggccgcacgagaagagagggcgggctggcaggaccgtcttctgcccttctctccatcatcatctttcctcgacctctcttttcagaactcgaccggacggcgagcgatggcttgaaagcggctatggccacacccaggcgtccgccttaccatctcccgacctcgcgctccttctaccgcccgccgcaaccaccgccgccgcccgcagcagacccgacccagtcggccgtcgtcgccgtcctcctcctcctcgtcggcacgctcgtcctcgccgtccttgcgccgtcggcgctcgtcccattcgaactccatctcctcggtcggttcatccgcctccggatgaaaacactggcgagctggctctttggcggccggtcgagcaagtcagccggcagcggctccggcgaggccgatgacgaccgggagcgacggctcgccgaggtcgagcgctgtcagtcgattctgccgctcttgatttcttcagtgcttgattggcggaccattagactgatcccgctgcctctttgcccgttctttctcatgctcgctcctcagacgggaccctgctccctcgcccggatggcccagctgctgcgaccggcggccaccatcccgggattgtcaacatgtccgggacgttctgcttcctcaatgccatccttcaggtgctcgcttcatccccgcgctttctttcgcacgcccactcgatcctcgcactctcggcgcccctcgaaccgacctcaagctcgacctcgccagccgtcacggcgtccctcctcccgttcctcctcgcgctcgcgacgccctcgtcaagtcgccatccgcggccactccgaccaaccgaccttgtcgaggcgctgagagtatccgaggcattcaagaaggcggggatgtttggccggctccgtgaccagcaggacgcccacgagctctgggcgctcctcgcgggcgctgtcgacgacgaggcggccgttgtgggcaagatggccaacaggcaaggcgccggtcttcgttcactggtgccgccgtcgtcgccctcattggacacagctgtcgccgacggcaacacgcagctctcatcggcatcatcgtcgtctcagctgccatggttaggccgaatggcctaccgacgggcctgcatcgtctgcggctactctgaaggcattcggctgatgcgctcgggcgaggtgtcgctctcgttgccagaacgaacggtacgtcgcccccagactaccatctcgctcctcgtcgagaccttgctgaccagacttcctttgatctatccgatcgccacactccacttcgacgcgccagtcgatgacgacgctcgagcgtctactcggccaggtgactgccctcgaggagcttgtcgacgcccagtgccggcggtgccgcatcacacgaacgcacgcaagtctcaaagcggcgctcgtcgcagacgagctcgacgagctgccgacgaacgtctccgcttcgccggcggtcaagcggaaaggtcctgctgagacgatcgcgacgggctcgaatgtcgcgtcgagcagtggcgcgtttgctgctctcgcagactctacagctctcgcgtctcccgacaaaaacccgccaaccgatggcagcggccagacgaaggcaaagcgcaagcgcgagcgtgccgggcggcgtgagctggagcagagacgggcgcggctggcggaggtcgagcgcttgatggccgagagtcgctgggaggccgacgtcgagggcgtccagtgggcgctcgtcgacggtggggtctcgacccggtgtgtcccgctccctttgccgcgggagtcttgcatcgtatgaggtgctgaccaactgacccccttattgtatcctgtcctgcaggcaagagatgttctcggctccgcccgacctcctcgtcattcacctcaaccgctcctccttctcttcatactcggcaacgaagaacacctgccgagtcgcctttcctggctggctcgacctgtcgcccttctgcacgacgggcgagctagggaccgacccggcaaaaccgatcagtcggcgcgcagctgagggcggaacgctcggcgcgctcgcggagggaggcgctggcgccggcgagcgcaagacgtacaacctcgtcggcttcgtcaaccacctcggcggtcactcgtctggcgtacgtccagctcagggctggctggcgcgtcagtcacttgactagcgacgctgactctcctctcatcgccgatcgcagcactacatcacctaccgcctcgtgcccttctcgacacccgagcgatggctccgcatctcggacgacgacgtcgtcgagcttccgctcggcggcggcgatgagatctggcgctggtctggccgaggcgaagttgtcctcctcttctacgagcggacggcgcgtgcggaagacgcggcgacggaggcgcgggccggcgtcgtcactgcggccagtggcgcgcggcaaacttccctcgccgaggcgccatcacgaccggcggggaaggatggcgcccacaccagctctcattctgctgccctccgtgaagatgttcgcgcgagcacgaccgatccggtcgacgcagggcaaaatgcgcagctcaccggaccctcatctgtcggctcgccgtcgccccctcccttctcgccgtcgccctcaccgccggcctcgccttccttgaggacacctccgccggaaactgacatggccgcagaggtcgggctcggtagaggaggggtgatcaccgatgacgaggagtcgacggagaagacgaacgggaagaagcgaaagaagaagggcaagcgaaaatgagcggcgtcgaagacgaagatttcatgctcggctcccatcgcggcgcccaagacaagacaataataggacatgaggctagcaagtcgcggatgaggtcatccctgccagcccaagatggccgccagcgggtcatccctaggccgggcgacatagccgtcgaggtccgagccggccgacatgccgtcgtcgtcgtcgtcgtcctcgccctcgtcgctgtcgtccatcgccgtgagccgctgctgctggaggtcggtcgagaggctgatggccgcatcaagggcggctttgacctcctctgcaggggacgatcagatgcattaagtgtcagtcgggctgaccctttctgagcaacgggggaaagatacacacgagccaagttggacagcccgtcccagacctcagcgtacttctgctcgacagcaagagggtgtcagcgatcaggagcagcaaggacgagcctgaagagcggacaaacagcgagaccggccaggatgatgcggacgttcgtgtaaaggccctcgagctcggcctgcttgctctcgagcgcgcggggatcgaagctctcgccggcttggatggcgagcgcaagcagaaggaagcagtaggccgaggccatgagcccgcacgcgcagaacggcagcgcccgggccggcccgtcgagcatcgtaaaggccgccgtccgctggagcgtctcgagccggacgatcgagtgcgcggcggcactgcagcgctcgaggctgaggcctggcgggaagggcccgtcggggacgtcgctcgcccggaggagctcgccgatctcttcgccctcgatgctcaggcgctcggccggcgagagccgtgagagcgtcgtcacggcctgcgaggacgagcccgacgagatgaggtgcgacgtcggcttgagacggccatcgagaccccacggccgcgcgggcgacgaggctttcggcgtaacggaggccaagggcgcgaacgaagacgtcgtcgaccgttgcgatggcgaagcagagtggaccgacgcagggttggaccgcgacggctgcgaggctggcggagtgagctgcgagagcaggttcgagccgtaaacctgctgcgggtctagcgacgtcggcacaggggggaccgtcgagaagctgtaggtctgagcgaaggcctgctgctgctgctgggccggctggccgccgagcaggtcggggaaggagccaaagtaggccggcatgtcgggcatattgagagcgtaccggtcgaccgtctcaaacatggacgtcgagctggctggtaccggtgtcggttggagtgtgctccaagcatcgaccgagacggggttgaagctgccggttgcgacgccggagccgacgagcaggccgccgtaagggttgatatcggcgtgaaagacgagagaggccgcgccggcgtcgttcgcataccacgggcttggcgggaccgctgctgccgttccgctcgcaaagtttgcggccgggtagccgccgccgttggcactgaacgccggtgcgctgtacgccgacgcctcgacacagcccacagtcggcgggacgaatccggccgtcgcgtagtgttcaacaggctcgtgcgggccagctgccgctggaggtgtccagcccgcgacggggagaagcgggccgtcaggctcagacgagccccagacgccgtcgatgacggcctgcgggctgctatcggccggcagcgacgggagaggagcgaagctcgagccggtcgagctcggcgcgatgggtgtcaccctggccgtctcgacaagctgggccgggctgatcggttgccggccgccgccgttcgggtccgagccgacctgaccagagcgggcgttgagtgacggcaggccgcagagcttacgactgaagaaagcgacctcggggaaggcaacccggcggtgctgcgaggatgagggtaaggggggagccgatctttgtcaaccgacaggcaggctcggaaacgaagaggcaagtaacgtacgagtgcgatctcgcacgtgctcaaactcatgagcgtgctcgtctgaaagttgtgggccatgtgctcctcagggcccatgcccttcttgacctcctggacggccttcttctcgagtgcgcggagcgagagcaggaccttgcggtcgagcgcaaccatctcgccgtggacggctgcgagccggtcggcctcagccgaggcgtcgtccgggaaggggccggaggggacgagcaacgagcccggcacggcgtcgggcgcggccgcttgtgggaaatcagcctggatgatgagctggaacgtccgggcaatgtggcggatggcgcccatctgatttggccagagctacggggcgcatcagaggtcgagagctggtcagcagcgtgcgcatggagccacaaatgggcagaacgggacgaacctccgggtcaatccggcacgccgggaactctgccgtgatgcgcgtgtcaaatggcgcgacgctcggcgggatgccgctcatgacgctcgcctggcagagctggccaaaggcgatccaccaagtccggcggcgcatgtcgcgcgtccactcttggtcgggcgagagccggagggcggcgtcggaccggtggaggttgaggtccatcgcgagttgaagcgcgtggccttggcgaagccgcatcttgaccatgttgccctgcagtcagggcgcacacgaacggtcgggtcagccttgtgaacaagattcgcagagagtgagcgagagaagggactcaccttctgggcaaactcccaggtgaccatgacgatgagcgtctggaccgtctgcagctcgacgccctcctcctcgccattcatctcagcctggccggcccggtcgagcgcctcgtcgacctctgcgagcgagcggcgcgcaaaggcttcgctcgcctggcgccggaggtgctttgaccgggccgactgggggtccgggtcggacgcgggcgggtggaggacgaggatcgcgaggaaggcgagcgcgagagacgacggccggaagccgccggcattgttcgaagagtagtccggaggggacgcgaccgaggcgtcggtcatcgaccctggactcccgtcgttgaggaagaaggccgaggacgaggccgacgggccgcccggggccgtcaggtagtcgacgagccggtcgaccgcgacgacctcgggcggcggaaggatcgggaggtaagggtagatgatggcctggtaggcgtcgacgacctcgcggaccgtccggtactcgcgcaggaccggcgcctcgtcgctgcctttgccgtttgtcgaggacgaggcggtgagcgagagcaggtcgagcgacgggtcggccgacgccttgaatgcggcgaggtccgtcatccgcttgaggaagagcgcgagtgggtcctcgacgaccgtcgccgtcgccgtcgccgacgatgccgaccggccctggcccggaatccccacgccagcgacgacggtcggcgccttccgcttgcgcgcgccgccccgcttgctcttgacatactcgcacgtgatcgcctttttcgcgcagttgaggcagacgggctgctcgcccgtgcacttcatcttgcgcgagcggcagttgaggcaggcattcttgaccgggtggatcggcgccttcttgacgccctcgctgccactgccgccgccccgggccttttcaggcgcgggcgcagccgcggaaagaggcagaggaggagcgacagcgacagtaggaggggcggccgctgctgccgtcgtcgaggaaggagcgtagccgaacgtctgttgctgctgctgctgcgagtggtacggctgcggctggtatggcagatgctgggtcgggtacgatgagcccgacgatgggcctgcggcggcggggtacgcctgctgcggctggtggaccggcgacgacgacgaagagtggtacagctggggctgaagccagggctgcggtcctccggcagcgccacctgctcctccggcgtggctgtcgacaatgctaccagccgatgcgaccaagggagcaggcggggccagcgtcgctgaggaggccaagggctcgtagcgagggacgtaggccgggcctgacgccgagggcgagaccgtcgttgacgacggaccactcccaccgccgtaggcactcccactgaacccagcatttgagcccgattctggaccagacgaaggcggtgggtagctcgtcgtctcgaggtactgaggctggtacctcgacccctgctgctggccgtagggtgcctgctgctgctgctgctgctgctgctgctggtcgggctgctggtagtaggccgccggctgcgcaggctgctgctgctgatgcttctgaaggtaggcctgctgctgctgctgtggatggccgtacggatggtacgacatgatgagggggttgaagaggggtgaaggagagaggtgtcggttcccgtcgtcgcatctcggtcagcccctcgctgctcgcgaaccctaagcaggcaggccgaggccacgcagcgccccctgctcgatcgcatcggggcggcccggagtcggccgggccctccgtcgcacttcagccctgaaccgtcatctcccagcgagatgcacgctgccaccttgcgccaacgggcaaagaagcttgagcgggcgactgagaggctcgacccgacgccccagcaggacaactcctcctctccctccgaccttcgccggccaccccgcccgccgccgccgctgccgccgctcgcccgagcacaccgccagacggcccgcgtccggctcatcctctcgtcgcttgcgatcctaggtgtcctcatctatgcggccaagacgggcaggctgagcgcctcgtcaagcaggcgagcacggtcgtacgctctccctggcggagcggtcgacggcgagtggcgtgtcgggagcctgccgacggcgtacgccgtctgcgtcggcgccagcggcgggctctacacagcagccgaaggcgaggccgacgaccgcctgagcaggggtgagggcgaccggcaagtcccgctgcagactccgtcggccgaacggtcctgcctcgtcgtcaacggccagcaggtcgtctcggtcggcccgctctcagccgtccaggcagcctacggcgacgccgactcgctcggccctcccccgatccactcgcactcatcacccgcacgagcgttcgaccctcccaaggccggactgaagatcattcacctcccggccgcggcgagcctgactcccgggttcgtcgacgcccacggtcatctgcagatgtacggcgcctgggcgacgtctgtcgacctcgtcggctcgcgctcgatggccgacgtcgtccgccggctcaaggaggcggtcgagaacgacccggcgctgagggacgcaaaggaagggcgctggatcgagggcgttggctgggaccagaatggctgggagtctggcgcgttcccgacttgggaggcgctcgatgccgaaccgctccgttcgtcctgaccgaccgactcatctctgctttctcctcacctgctgactgtcacacctgtctcctgcctgggtctcagtgcaaggccgcaagatcatcctcacccggatcgactcgcactcgatcctcgtctcgcgcgccgtcctagcccttctcccctcaccccttccaacctcgatcgaaggcggtgcgatcgtccgctcgccgacgacgggcgagccaaccggcctcttcctcgacaacgccatgaatctcgtctttgcggtccgcggccggccggccgaggacgagctgaacaggcggcttgcaagggtcgcgcgggacgctgtcagcaaggggctcgtcggcgttcatgacgcggggacgagcccgcaagaggtcgccttctacactgcgtgcgtcctggaaagcgagttgccttctgtgctgcatcgctgacggcccttcgatctctttcaccggcctcgctgcagtcgcgccaaggcgaatgctctgcccctccggttctacagcatgctcgcctgtccggaccggtccctcttctgcgggacaaacaactcgctcgttccctctggccagatcccctgggaggcctacgacggctcctttgttctgcgctcggtcaagctcgtcgcggacggcgcgctcgggagcgaaggcgcggccatgcacgagccgtacgctggcagggaggccgagggctggcgggggctcttgctcgcggacgaagcgtggttcaagccgctcgtgcgagagtgggtcgagcatggctggcaggtcgtacgtccctcacgctagtggcgaaatctctctctacatcgatcttcgctgacgcgctcgctgtctgtcagaatgtccatgcgatcggcgaccgagccaacacggtcgtcctcgacgcctttgcgccgcacctctcgtcctctgcagcgacggccgacggcaacccccatcggctccggatcgaacacgcgcagctcctgacgccggccgacctcgaccgggtggtcgaccttggcgtcatcgccagctatcagccgacgcacgcgacgtccgacatgggttacgtcctcgccaagcttggcccggcccggatggcccgcaagggcaattatgcctggcggtccgtcctcgacggcggcgggagggtggcgctcggctccgacttcccgatcgagagcgtcgacccgctcaagggcttctacgcagcggtaacgaggctcgacgagcgaggtgactcacctcacgggccaggcgggtggtaccctgccgagcggctgacgcgtcagcaggcgctcaagggcatgacgctcgacccggcctatgcggcgttcgcggaagagcacacgggctcgctcgaaccgggcaagcgggcagactttgtcgtctgggaccgcgacattatggcctgcccgccggcagaaattctcgaggccaaggtcctcgtgacggtgcgtgctctccgctggcctgttccttctgcgactggttgctgatgttctctcgcttgtttcctccacgcaggttatcaacggtcagcccgtctggggttcgatctgaggggctccagatgaaagtggctggatggcgatgtcttcatgctgtgtcgatgagaaggcgacaggatgcggagggtgagggcggcgcgacgccatcacgagcagagagaccgctgccgggtcgagcccaccgacccgccgtctacttagttctggacgccccgatacgctgcagttcgattctagtcgccgatatcaagcatatccttctgtccaacattatgtgtggtgacatgacggaatttctgtcgctgcagctcggcgtctctcttgccgtctcggccggtgctcgcagcatcgtccccagctcgatcaggtgtctgcgtaaagcggcttctcaggagcaaagatgataacgagtgtatcactggtgaggactgtgcgctaaaggaagagatgaagcctgcaatcgggccggggagcgagctagggtctaatcacaactggcaaaaaggattgctctcgatccgggaatcgaacccgggtctcccgcgtgacaagcgaacatcttaaccattggaccaaccaagaattgttgaaggtaactgatctgtacagtatacaaaatataattgcagacacccctgcatgcatattgaccatccaactcttgtgtagcagaacttggaccaccttgaagccctcgaccagagattttggagcatactctcattcatcatatcttatactaatctaacgatgttatgggtttcgcaggaaggcatgtgataagtcgcggcgagggtcaggcgcagacgggcggccagacaagtaccgggcccccttgaaagcagactggccatcgggaacgattctctgtgagccaacgtgagtgcagttgacaagaggtgctggcagggcgccttcactgagagactgacgtcgagctgagactaagtacccatgctgacgatcggccgtgagttgcaagtgtggaacagatggtcatcagatcgacctcatactcgcagacttgcagcgaaggccagctcaaccgaagaacggattgcgctccgagtcctcgccagcgccgacgctctttgagctcggccgattgccgtacgagctgcgctctccgccagcaaggtggttcgtgctgctcgagacagtcaggcggcggctcgcgggagggggcggtgcaggccccttttttccaccgccaaacgcgctcccgaaacgaccgggcgggggaggtcgtgctcggggcgtcaggccggtcttgtcgtcctcttcatcgacagacgagtagcccgggttcagcgagtgttcctccgtttccgaatcgctcaggaacgactgggcggacgtgttggacggctgacgcctcggcggcggcggcagctgaaggccgtaagaagatgccgagcgcgagatcggtgccgatgacgacggaggaccgcccgcagagcttggccggcgagaagtcggtagtggagggggcgcagcgatcgtcggtggccgctggtagggatcgacgtaggctgaagggaagatgcctcgctcgccagtcgcttctttctggccctggaaccagtcatccgacacctcgcttgtcacgacgatcactgcggggacagcggtcagcatccgtgaaaaggtagccactggttggtgagtcgactcacagtcaccgatgctgagggctagctcgtccggtgccgagctcgaaaagtcgtaccgcgccttgacgacacgctcgtctggattgacaggcgagagaggcgccgtgttgcgcccgggcaggcccgagggaggtggaagagccctgccaccgccacctccgccattgaggctgctgagcgtgctcatcgcaccagtcgaccggatccgcccgccgagggcagggctaaagggaccgcgtgcgctcggccgccgtgccccgtcgtcgtcctcctcctcgtcctcttcggcatgggtcacatggccgccagggttcgtctcgtcgagcgagtcccacttcttattcttcatccgaagtgagctgaagagaccgccgccgctcgagcctttctccgacttggcgctgttcgaccgcgtccgactagtggtgccgctcgacgagcccggccgggacgattctggcgacgggtcggggctctcgtgattggacgaccggaaggcgggccgcggctgcgagagcactggtggccgagaggtcctgagagagcacggcaaggcaggtcagacgacatgcgcgaagactcaagtgggagatctgaagacgcacgacgccgaccagtccttcttgacgtcgagtagaatctcgcggtactgctcaatgtacgtcagatgggcgtcgaggaagcccgagaggtcgctgagaggcgacaggttggcgtcagagaggcagcacgccgtcatgtgcgctggctgcgactcactggatgctctcctcctcggccccgcggaccgcctcggcgcgctgctcgacgtcctcctgcatctcctcgctgccgaaagtcaaccacaaaggtgattagcgctccatctcggactccaagagctaacatgagggctcagctactcacaagcgcgcccgggagacgcggacctcctcctcgagcccgcggtcctgcttcttcgaggtcgtaagccgcttagcagcggcgtccatcgcgagccggcgcgagtcgagcttcttgcgggctgcctggtagtctttgacgccggcgaggttgcgctcaaggccttcgaggtaggacgacgacaggtcctcgaggaagcggtcctgtactgccgcgactttgcactgcgcccggccaaggttgacgagcgcctcgcctagcaggatgcaatgtaggaggtgtcagttccacatgcagctaaatcagaggctgcctggtgcccgcctctgactgccctttgcagaggcgactgaccatactcggagccccggccaattccctcgccaaagtggatcatgacgaggccaagcgcttcgaccggcaggaccttctccttgccattgaacgcagcgagctcggcgtcctccagcttgtcacgccgggacgacgccttgaagtatgtctgcgaggcggtgacgaggctgcgtcgagcgaggcaagttggcggtggtcggcgatgaggtcagcgccggtcagagaggaggcgggacaagggcgaaggacctggccaggctgcgagggagactactgaccattcagcaccgcgcgtgcgtagatccatctcctgctcgacttctcggaaggcagagctgcagaaaaggcgcggaggtcagaatagagcccatcgcgtcgcgctcagcggtcgctccgagcaggccggtcgcgagcgatgcgaggagcggtcgtagccctgcgagacgcacctgagttgcgtcttgtcctccttaaagagccgctcgcccgtccattgcgagaatttgtcgatctggaggagccgttgagagaggtcagcatcagctagctcgcaggccatgccagagcgaggggcgggttggcccttccgaagaggctggcgctcggcaggcccaggagcacgcccgcgagggcagcccggtcgccgacccagcctgagaggcaggagggaagagcgcacctgttttccagccttcttcatgctgaaggtctctgagcttgagattgcgttcgagtaagggaggaggtcggagggaggcgcgacagacgggccgacctgctgccgccggcgcgcctttgtcgccggcgtttcacctgccccctttttccatccggtcctcgtcatcctgcccagcgacgtcgacgacgacggctggttcgcaggctgacctgactgctacactgataggaggggacgggtatgatgtaggtgtgaggctctcttccccacgtggtggtcatgcggcatccagcctatcgtccgtccgggcaaccctccctcctcccaccgaggtcctcctgtcagtcggccactccgcctcctctctcctctcaccagcggaatcctctcaccagcggaaggcgcttccttcaatcaccgatggccctgaagaggaggcttctcagctcgcactcctgacccgcagaagagagcatgcgggcggagggacccacacgagctcgtctccgtcgacggccccaagccttcttgacccgctccacgagcctctctcctgcagctagcgcccgcctccgcccagctgcctccactcatgggctcctgcttctcatccgcctctgcctcgcggtcatcggcatcgactccttcgacgtcggcggcggctggtcgagccagagagattgaccggtcgatcaagctcgtgcgtgacctcgagctgtctatcgatcatccctgtcgacgctgactgtcgtccaccctctcctcctaggccgagcgtcagatggcgcgcgaggtcaagattcttctcctcggagccggcgagtcaggtcagcccctcatcctcggctgtcggcgcaggcgcaactcacttcctcgtccgtctcaccgaccaggcaagtcgacgatcctcaagcagacgcgctacatctacggcgtctcgtactcagcgtgtgtagtttcggattgagctcgtttcccgtgtgacctcctgatgagtgctaacctcttgcttgcttgggccgatctgcagggacgagctcgaatgtgagtagcaggcctttgcagttgatcgctgctcagacgtgtaggcccctgactgcccagctcctagactaccggcacctactcttcgagaacctcgttgtacggcatcctcgaccccttcatctgcctgcagcaacttggagggctgaccgtttcggccgttgtgaatccaggacggactgcaccagcttttcgatcgaatggacgagctatcgctccgatgctctgcggctaacgaggtgcgaccgaaggctgtttgctcgccctacagtcatacatactgatctgcagacactcttcatgacaggttcacgtcgaccgggtgtcgagcacgccctcgagcggtgggctgcctgcaggggacgcgcttctcgtcagtatcaaggccctttggaccgactccgctattgttgcgacctggtcaagggccaacgagacggcccttccgtcaaagtgcgtcgtccgatacttcgtcaacacgaagaagcgctgatctttccctttttttgcagcctggagtacctcgttcagaatgccagccggttctgggcgaccggttttgcgccgaccgacagcgacatcctcgtgtcgcgatcgacgacgatgggcatatctgagagcacctttaccgtcaaggatatggtcagtggagagtctgccccaactagacctgatccaccgggctgacgccgaaggacgctttgaccggcccctggcgactcagacgtacaagattgtcgacgtcggcggccagcggagcgagcgtcgcaagtgggtcaacgtcttttccagcgtcaacgctatcctgtttgtcgcctcgctggccggctacgacgagtgcctgctcgaggaccgagacgccaaccagatgcgcgagagtatggtcgtcttttcacagctcgtcagcaacccgctcttccggaagacgtgcatcggtgcggccatctacgcttctaccgccaatgctcgacctcgtcctgatgtctaggcctgcctgcagtgatcgcactcaacaagaacgatttgttcgagcgtcggcttaagacgaagccgctcggcaccatctttggcgactttcagggtccgccagatgatgcccaagccgctcgcctgtacctccggtgcgtcgcttatgttgttggtccggcgagggccgcactgacggcccgaccctacctggcctctgaagggagaagtttctctcgctcgcccgcaagcgagacgagatcaacgtctccggcgctgacccggagggcgtgtacgtccacgtgacgaccgcggtcgaccgacgtgagtgccgtcatcgttggcttgcgatcagtcaagctttgaggctgatgtgaacgcctgctctctgatccgactcaggtggtatggtcagtctctcttcctcggcttccagccctgcccggccgcagtctgaccttgctacccctcccaggaggtcgtcatgcgcgctgtcagcgatgtcgtcacgcgcaacaccctccgcgagctggctttgatctagcaccagaccgaccagctcgcgcttgcccgtcctgccttggacctctcttcatgaccccttgacgactctgatgcgtcagcgaatggggcctcttgcaagcgagtctcgagaaaggaaacgacatctacaagcggagcatgcgctgcctccgccttttgtcggtcgcccgcgactcgccgcaagcctacggcggccccagtgcgacgcccaagacggtcttcaccgaccccacacctcgtatacgacggcaaggacccgccgccagccctttacggtccgacgctcgcggacgtcgccctgccagacgtccttgatctccttgccgatcaagaggtagccgcctgcagctgcgcggacgcccgcccgtgccgacgaaggcaggaggtcgatccctggccgagatgaggtggccagtcggtcggcgagcgcgaggagcgggagcgcgtacgtcggccaggggaagacctcctgcgagccaagaatgagcggcaggtgcgccgggacgggatcggccggcctgggagggctgcctgctggtggcgccggcagcggttctgatccttcgaaccaggacatcggaaggtagcaccgaccttcctggccgtcgccggcgaggtcgcgggcgatgttgacgagttggagcgccgttcccatctcgcgactcttgacgagcaccgtctcgcggccctcgaccgtcgaaggcacctggtcggatcgctcggcccaagcgaggtagacgatgagctcggcgaccgagccggcgacgcagaggccgtagtcgagcaggtcgtctaggcgcttgatcggactcgagctgctgtcgggcaggtccggggcgagcggataggcgaggtcgagcgagtagccccggaggagctcgtcgatcggataccgcggtacgagccgcgtcagacgtgacagcaggcggaatgaaaagtgagcctcggccgggacccgatcagccaggaagcggtcgatcttggcttgtgcgacgattggcggctctggaatcggccagatgccacatggccgagacgggtgcggggctggcaagagctcgctctggccgggcaaggctgcttcagacacctttgacggcgtcggagccgggccgaagatgaggtcgaggtagtcgctgatcatgctgatggcctgctctgcagtctggtcggccgcaggtgagtcgatcaggtcatccgtaacgcggcagaaggagtatcttccgagttcaccggagacggggatggacgtcagcaaagtcacctcgaaggttcgcagcgagaggaagacgcacagggcgaccagcttctcgcggacctcagctccgaagccggcgcttgcgacccagaagctgcgcgatttcttttcgagcagaccaacagccttttggaggtcgtcctgcgggaggaccgggtagccctcggcaggcacggagacgagcgaccagatcggccgaccgaagaaggggaacgtcgtcggcggctgggcggtcgcatgggcgatgaccgggtgcagcagatgaagcgccagcgtgtggtcgctgaggagagccaggtcggtcgaggtgtagtcagcccactggtcaggatgcgctgggatgtccgcgcgcgccggcctggactcacacggccgagaggcccatgacgatcaagacgttgaccatgaagaagaaaagggcctccctggattggcaggcagagcgtcagcaccatgaccaatgcacagcaatgggcgagagattcgccgacgtactcgagcggcaggctagtgaagaacgtaatgccggtcacccagcgctcgttcatgaaccaggcgccttcgccgatcgcaaccttgtcgacccagcaaaagtagagcgttggaaggacgatgctgaggatagtggccgttcgccgaccggcgctcggcgagaaggcgaagcgggtcgaggtcccgaacaggagcaggagcggcggcgtcacgagcaggagctcggcgaacaagtacaggaagtgatccgaccggcgcgagagctcatacaagacgccgacggggatgaggccgagcgcccagccaagccgaagcgccgccggcgtcggcgtgtgcggcaccgagagcgacggcaggagcggccgtgtcaagagcacgtacgtgacgcccgtgacgagcgtctctgcgaggggttgacggatgacggcgcgaagcagcgggtgtcaatgaactgccgctggcgccggataggaagctgacgggcgaagtgctacggacggataaggaagaaggcgtactcctcgaacgggacgtcgagcgcggtgccgacgaccgagttggccgggtacgaccagacgcccttgcggatgatccagctgtcccagggcgaggcggcggcgaaggccatgccgacgaggaaggcgagcttgaacacatcaaaccgggtgagcagcggccgagacgcgagcaacagcaggccaagcaccgggagcgtgtaccacagatggctagaggcggaaggcgctcgggtcaggtctcgtcaagaggcgaaaggctaggccgagctgcccccttggcgcgtctcgagccccggtgttgctccagcgcgagcgcaggactcacatctcgaggtaggtcatgcccatggcgacggacaggtctggtggagaatgcagcccggaccgcagagctccgctaagaagaagaaaacagaagaaaggacggtcgatggcgagagggaaagggacgcgtcggcgttggctcggcgaacgatcgtcccacgcgcgcggcgtcgacacgtcggcaagctgcgaacgcccttaaggctcggccggcggcctgctcgttccacgacatttcgcctcaaggtagcaatcagacgcaggccacgctataaactgacacaaagcccgccgtcgaccgtcttagtacgatatcatgaagatgacgagccccgggcgaggtcgctgtaagcggcctcgatgcacgtccgcagatcgcggtacgagacgaccagacagctctgctcgtcccgcgacatgagcatgatcttctcgtccgacccggcgtcgagctggaggagggaatggttgagaggtcagtaacgagctgccgtttgagacggcgatcaccagtggacggaccttgttgagacacgtcaggacgtggctcaggtcgagcaccggctggttgctctcgtcaacctggtggaagaccatgtcgcggaagagcttgataatgtagcggtcgcccgactcggaccaacgcgggtcgtggtcgaacctagagaagtgaaagaaattgacggtcagcgcgaggtcgagcacgcctcgcaaagggcgacgtcgtcgggaaacgcactctggccgctcgttgatgaagccgaactttgtcagtaggcggacgagccgaccattctcgagctccttggtcatgtcgctctcgagcaggtcgttgtagtcgtgcgcagcgttgaggtcggccaggacgtgggggccaagcagggcgaggacgtcctcgatcgtcttgcccatgccgggcggcgggttgctcagcagaaataggacaaagttcttaagctcctccgagtacgagcgcgagagaacgtcgagagccttcggcaggttctggatcgcctgcgtcgatatgttggtcaagccgaggaggagcttgccaagcgcgaggatgtcttcttgctggtgaacggtgacgcttgggcctgagccgtgcgtgacgacgtcaagaagcgcacagcagttgagccggaggctgcacggaaaggcggaacaggtcagcaaagcgctgctgtggcgtgggaacctgaagggccgctcgacggaccggttgcgacccgtgacgagaatcttgctcgcatcgacaacccgggcggcgaggccctcgtcgtggatacgtttcagcgcactcgcgagctggacggcgtagctccagacgatgcgctcgggcacgtgcatgtcttgcggctggaagcggccgttgcggccgacagtcggcggtcgggggacaaagtgctcctggtagagcgtgtgcgacgccggatggtagttgtatgcaaagatgacggctgagagacaagagctggtgttagtgggccgcaatagtctgccgcgagagagccgcgtcagacgtacacgagtcgccgaacgcccgggtcgtgaacgcctccttgatgccgacgacgcccgggtgattgatccgtcgccagctctcgatcgagctgaacgcttggtcgtgcacgatcttgaagccctctatccgccggaggcagtaaaggttgccgtcggtcatgctgctcgcccggaaggcctcggtcctgaggccaccgagcacgctcggctcagctcgaccctcaccctggctgccaccgggctcgagcggatgcagcgagtgatagacgtgcagcgatcgcggcagattgggaatcggcaccggcgtcgtctcgagggcggcgtgcgtccgggcgaggagcgactggtgcgtcgagggcgagaggaagaaggtgtggatgttggaagaagaggagtgcgaggaggatgatgcgtgcagcgcctggacgtgcggcagcggcgtcacgtagagatgatagtcgagctgcgtgcagacgaggtacagacaagttagcccgggcgaccggcagttgcgcagcccacgtccgacgaggcacgcacaggttgcctcacaacgactccgtgcggcatttcggggtagaaaccgacgctgccctcagcgtaatgcgcatcgacgtcgtccatcgtctggatgtcggcgatgtcgcttgcgctctggcgcgaggagcctgacggcgcgaacggcgcggcgctctgttattgggccaattgtgaggcacgtcagcgccgagagagttgagggttcttgtgcatgttctgggaatctcaccagggagagcttcgtgtaagcgtcggtcaagccggtggctgccggcagctcagaagacgacttcagaggcgatgacgggccggcgagggtgaacgcgggggagagagccgagaggaccggtgtcgtcctagtagtgagagatatagtcagttgcaagccgactgacaggatgaagacagtaaggtctcaacgcacttgacagagctcggaggctcgtcggcctgggcaggcgcctcgctcgtcgagaagacgggcaccgctgccgagagcgccctagggacaaagctgggggcattcacgacattctggaccgagaaggacgggactgccttgacactcgtgggtgagctgcaagatcgatggaacaggccggtcgtcagagccgagatggcggggtcgtcagcgcgcgccgtcacgcgaggaaggcgagcccgctatcaaggagcggacctcggcgtgctgaacgtctgcgttgccggagcatgcttctgatggagtcggttgcacgtcatggtcagcgagagctcgcactgctaggagcgaggtcatgcgacgcaccgaggggtggtagaagaggcagccgtcgtcctcgtacttgcacgagctggcaagcggcaggagggagctcaacggagggtgtcagcttgactcgcccggccgccatcgcgcgccttctgtgctgcaccgacgcacccgtgaatgagctcgttccggcacatcttgaggcctggtagagagcagctcgacgatgcgtcagccgaagacaggtctcaagggcagagggaggcgacgcaccgggctgaccacccgccttgagctcggcgttggcgccggcagctggcgagccgggcgcctctgccggcggggccttgatctggatggccgcgctcatcaactagcgagcgctggcgtgtacggtggcgactctagagtacgaggagagagaagacagtcgaagggaaggctggcggggtatcgtcgtcggggaggagcgcgtcggccggccgtcttggctcgagacaagccagcaggtcgccctggcccttgaccttcatctcctgcccaccctctcgcgcctccatcttcttctcgtctgctgatgccgttcctcgacgtaccttcggccgctccgacgtcgtcgtcctttctgctcgctgaaagcaagctcggcgccggccgccctcgagcaacgcccgagctgaccgaggccagcgtcatcctcccgggcggcagccgacgcgaaggcgccgacggcgcagggttcgtcaatcgctcagtccggcacgtctgaacatcgctgacgacttccactcacgtacgttgttccagcttgaggagcgaggtcattacgccagtggtacgtcgagtcaggcggtcgcaagctctggcgttgcaccgcgtcgcgtcctgatccgactcgagcaccctctcccagcctgccttcgtcttgaaatcgtcgctcgacgaggccgcgacgatccacatcccgtcagagtcgtcgtcggtacgtctatagctcgttgtccacgccttctgaggctcgagtgctcacgcccagcccggtgctcgccgtccgcagccgaccttcgcccaggggacgaagctcttcatcaacgtcgcccagcacgcgctcctcccagagccgccaaaggctcctccagcggcgactgtcgaggacctttggatcccggccgtcattggtgagatggctgtgacgattgaccgcggtgcgtcgtggtgcctgcgtacattcgtcctcgtcgcgcacgaccgctgacctgccggcgtctctcagcgggcaaggtgtcactcgtcgttgatgccgtcttccacacgtccgttaccgacaaggccaagcgcgaggccaagtacaagctcttcctgatccaggtcgtgctcgaaaaggtcgaggacaagtttgaggtcgagctgtcgcgcggtgcgtctcgctcgaggtgcccttctgcccggccaattcctgacttcctggccctcgctcaatcgcgcagactacggcctacccaagacctttgcgagcaaagggcccctcctgccgcggacggtcgttctcccttctaaagcgtcgaaaccgctcatcacgccgtcaacggccccttccgcgagcgacgctgcggccaagccgctgccagcatcgaaagagccgaccaagcgggcgcgcgtcgagtccagcccaatggtcgcaacaagcacgctcgagcacactctgaccttcccatcgccttcaaccttctccctcctcgtcaaggttccagcggcgatcgcagcgcctccgaaagattcgctgccaccgccatcgacggcgctgcagctcttgccgccacggacgctcgttcttgcccttccaggcgctgaaaagctctcgatcgacgtcggtcgaagccaggttgacttgcacgggctggaggccgagtggcgcgtcgccgagtcggagctgcgagtgagcgggcgcctgactgcatgacctttgcccgtcaaaagatgagggacaaagtgggcgtgcaattgcgtagacaggcgggcgtttgaaagctgatgcggcacgggaccagcgttgctgagcggtacgagaaggcaaggagaggagggtggccaggaggtcgccgaagttggagagtggagtgaggtaacgtagcggtcgtgtaatgggatcgtgcggggtgggaaggatacagggttgagagaagaggggcgtttgaatcatggtgagggcgtaaagtaaaagttggcggccatcagttgccggccttgaagaggttgaggaccttctcttgcccgctgcggccaaacagcttgagcttctcgccgcttgagaggcgcgagccggggccggggccgtcgtcctcgctcgtcatagcggtagccgaccgccccgacgctttggtcggcgagaccgatgacgaacgggacaagagctcacggtgaggggttgagggcgaggctgtgtccgcccaaggggtcgagaagcccgaagtggttggcggcgacattggcggcatcagcggcgcctggctgagcgacgatggcgtcgacgttgggcccttgagcgacgccggcgccgtcttgagcgcgctgaggttctgcatgtctggattggctttgcgccggaagcgaccgcccttgaaagtaagccctcggcgggaggagaacgacgtcggcggcgttggcgcgttgaccggcgacagaggcgccaccgtcggctcctcgaaggccgagggcagtcgattgagtacggccttggactcccgtctccgtagctggccgaatcgataacggtcgacgacgccgcgcgcgaacaggcttggcccgcgcaagccgttctcggcctcgagccctgcgcgcggcttctcgacgacgtcccacccgtcgtcgtcgtcttcgtccgagtcgacatcgtcgacctcggcgttgggttccgagtcggacgaggcaagccggtcgcggtcgacggcagcgatgcccgtccggccaatgttggcgtgaacggagacgggcgagatgggcggctcctgcttcaactcatctagcgacgaggctgacttcgagccccctggggaggcctggtcgaccgtgtcaagtgacattccctcgctcgacggatgctggaggtgggttgctgggttgaccggggccgccggcacactttcggtcgggaggtaggtttcctgcgcaagcccgggccgcgacgagtccatactgccccgaaggagctcgccgctcttgcgaccgtacgagctgtcttgctcgctgccgaccgtgaagatgctggcggcgtcgcgctcgcggtatgagtagccgccccagaggcttgcgcgatcgaccatgtcggcagcggcagcagcgttggcggcagagggcgcggcggccaggccttcgtcgccagcgtcgccgtcgatcgtcggcgccatctcgaggaaggcgtcatcaaagttctgcgtgtcgagcgcgttctctgggtcggtcggaggcgtgtagggtgggatgtacctggagcaatgtcaggtgccggccaaggtcagctttgtcgcctcgcggtgacgtctgcccagctcgccgcacctctgatggtaaacgtgctcccaggagatcatttggaagtaggggtgtttcttgatgcggggctcgctcagccggagtgccggatcggcctgcaggaggccgcgaagcaggctccgggtgtccttgtcgatcgcccgctcctctgggaagacgagctcgtcgtgcaggacacgagtgtacatgtcgttctgtcgcggcacgatctcgaggtcagctaggagcgctaggcagacgtcgtgcagcaggctctcacgtggttcggcgcccagaagggcgtcacgccgacgagcatctcaaacaggagcgtgccaaagctccaccagtcgacgccgtacctacaagaaagagaacgatcagaggtgatcagcttgcgcctagcccggctgatctctgttcgtgccgacatacgagtagggcaggccacggatgacctccggcgcgaggtactcggccgtcccgcagaaggtgccggtctggtccgtcagcaggtcacccgttggcgcccagtcgagccgctgctggtcagtcatgccgcccacaaggggctgcatgtactgcggtacgattggcggctcaggttcgaggtcgaagccgtcgacgtcaccactggcgagcgcaaccggcggcgaggacagggcgcgccgagggaactctgtggagggaaatgacaagagggctgatcagtgccgagtccttcgtggtggattcgatagcagacttgatctaaccttttgagagaccgaaatcagtcaagacgaggtggccggcgccgtcgaggaggatgttctcgggcttgaggtctcggtagatgacgcctagcaggagagcacggcagagtcagatttggcacgcgcctcgactcagagcgcggaaggaggatcttaccggccgcgtgaagaccttgcactccctcgacctggggattggcacagaaaaggaggatcagtcgcttgagttgtgacggctcagacgaccaatcgacgagactgacgatctctgcggcgtagaaacgggcgcggtcgcggccaaatttgccccagcgagcgagttgcgtcgccagatctcctcctgcaggttccgcgcagagactgggggcgtcagcgacgaagaggacggcaacagcagagtaagcatggcgcaccgggatgaaagtccatgacgaggaacaggttctgcggaccgcgaacgcgagaaggtcaagggcctggggcgtctcaagattgagcggcaacacttcacgcacctccgagtcgtgaaacgagtagtgaaggtgcacgacaaaggggttttttacgtcgcgcgacatgcggcgcaggacggcctgctcggtgagggtgtgctgcagctcctgatgggcgagcacgtgccgcttgacgatcgttttctgagccggaaggaaggcgttgggcgtcagcgatggcaaaaggtgcgcgccgactggcctaagggaggaagaacgaacgagcgcgagaaggggaccggccccgctcccactccgctccttcttgcggacgagaaggaccttgcccgcacagcccttgccgaggacgcggatcagctcaaagtcgtcgatgccgaccttgcgccggctggtccggtcgcgctttcgcgtcgaggctgcgaatgcctgcgcctcggaagcagccgcggcggaacggaactcgttgacgtcgtcgggcggagacggccggtcgacttgctcgccgccacgctctcggccgttattagagcgcttcgtgagttcgactgattgggtcgacctcggacgcggcgacgagtccagcatgctcggcgagcggccggcatcttcgggaaagggcggcgaatgcgcagcaccgtcaaatccaggcgacgaggttgacgaggcaccgccgtcggacggctcggagctggcgagtgtcgacgatgacggcagcgtcgggtgtgaagccgcagcgaacgggtcgcgcccgccggagaggagctcgatcggcgcctggaggggcgtcgtcgtgcctgacgaggtcgcgctgctgctccccgcgcggtggatacggaacgcacgggtcagagccgagtcggtgagctgcttggtcgagatctgatcggcgttggactcttgtgggagagcgaagccttcctcctgcgcgtcgacgagaacgccatccccgcagaggtcgctctgcggcaggttgtcggcggagaattcatcggcaggccggaagggacgcagattgcggccgaggccccgaagcgacgacgagaggctcgctgcttggtgtaagccctgagccgactgcgtgcggacgatcttgcgttcgacctgagaagggacgaaaagaaggcatcagccaagcgcaagccgatccaagccgattcgtcgaaactcacgcgagtcgacgccaggtcctcggaccgaacgcggaggaagcgtcgccaagtcttgctctcgcgcacggctcggtcgttggcgagcgtcgtgaggaaagttgacaggctcgcgagcggcgatggcgacggctcgaggtcggatcggcgcccctccttcctaggcgcctcgttcgtagaggcagcaaccgaggaggacgaagcgatcgaccgtgaggtgtcagaacggtcgagcatcccgtcctcgctcgccaacaagaggggcgaaacgttcgggatcggcgggagctcgtgcggcctgtcgccgccgcgtgctgcgtccatcgggtcctcctcttcgatcgtcggcgtgctgctgccgttcagcgccgcccgactggcgccgagaagtgggctcttcggcgggctgagacgggctcgggccgtcgctggcgttggcgtgctcaaaccgctgacggcatcgccacccgtcgacggcacagacgatgccgccgcagacgaccggtcgcgcgagccttcgcgaaggcgggagaaagctctgcggatgctcgatctgcgcgctggaggctcgggcggggtcgactcgcgctggcctgcgctgctggggatggaccagtcggcagtggcggaaccgttgagcagcgcgagagcagcggaagggaaggccggcagggaggtcgacactcgaccgacggcgagctagtcaattgaagcagatcagatgtcaggcgctgaccgatagagggccggcagatcagcagggcgcaccttgtcgtgcgtctcccggatctccttgacggtccgcagcagcgtaaaattgtgcgtcgccgctgatcggtcccgtccgcagaagaatctgtcagcttcaaaaccaaatgccctggactggagctcttcgaacgacgtacactggacatagacgcagagctggcctcgggcccgaccgcgcgaaccggccccttcgtccgcagcgacgctcacgcgccagcctcctcccccggcagcggcgtcaacggcggcggcatccgcaccagcagcaatcggccggtcggccgtctcgagccggggagcctggttgacggatgaggagggcgctgttgtgcttgctgatcggacagcgggcgatggacgctggatggcgccgagggaaggcgggagcggcgaagcgcgagcgggtgggtcgccccaggagccattgagctcgccgtcgagcttacccgacgtcatcacgccaaaagccggctggcgttgctcgacagccagacctagaccaagaagggaggtgtgctcggtgcccaggcgagtggggaggaggccgtcggaggccgagggcagcagcgaaggctcgagcgcggtcgtcgtcggcgttggcggcggaagggagctcatgctcggagctgctggggctgtgtcgtccgatggacggtggtccgagtcgatattgaagaggaggactgattgagaggctggagcgctgcttgtgcgagtgaaaaggcccggatgacagggctgaggttgacgtgccgatgagcagaggcgaggcgacctgaacaggggctaaaggtgagctggaggcggcgtcgaagggccgtcgagaggttcgagctgcacccaacgagagagatgcaaagtcagcttatgctctgctcgtacgaaccctctgaacaagacaaggccgggtcgggtgaaagggaggctcatgtggccgccctttgaaactctcgaggaagggcgagcgggctgagcgatgggcggacggaccttgcaaggcgagctcgtccaggcttgctggcagctgatggggcgacgaagggcgacggaggcgagaagctcgccgggtggttgagcggaggaggagtgaggctgagtcggtgtgatgggcgaaggtgaagggcagacaagggccgaagcctcgagccctcgttgcgccgccgccccgcgagaaaggggcccgcgctgcgcgcctcccgaccaccacgcgaggtcggcatggatgcagcccgcggcagacaaaggcctgctactcataggttctgatccagtcatcgcgagtgggcgctctcagatgcagtgctgtcgtccgcatgctgagctgctttctgcccggaggacacggctcgaggcgggggtcgccattgcgcccactggcccacctcgacaagacctgatgctcagctgtccacccacgcacctgcaccctccctttgacctagtcagctcgagcagagccgcccgatgctcgccctaagaccagagaagcaagttctgcttgccaatctgacgcgccctcggccacccgaaagacggcgaacgactggccgctcgtccggcatcgagagcaggaccccagcgtgcgttgcagggtaacatcggtatgtttcgaagcggaaagggggccggtacccggcgcgagagagaggtgcgagaatgacaagggggctgccggacggtaggcgagaggacagagccgacgagcggtcgagacgggcgagcggcacccttctgagccgatcggaccacctcccggccgggcaccagcagcagaggtgcaaagatgagggtgcggggagcggggagcccaataggcgctactcctcgctcatgaacggcttccactggtcggccggcggcgggttggcgaggggctcccaactgcggcagttgcgagcaagagcgcgtcagacggccggacaccgatttaaaacaacagaggggaagggacgcacgccttccagtcgatcatccggccgatgagcgtctcctcccgccgggcgacgtcgagcagctgctcgacctgcatgccaccctcgatcgagctctcgaccgcccgaacggcgtcgtcgccctggccggcgctcgagccctcgacgttatcgggcgtgacgccgtgggtcttcatcgcctgctcgacgatcgacagccggtgctgggtgagggcctcggtcgcctgccggtaagggaacgtaggcggcaggtggccgagggccgagagcgtcgtctggtaaaccgaggcgagggccgggagcgggttcgtgtggacgacgacaccggtcaggaaggtcgactgcttgagcagacggacggccgaggagcgcatgcttggaagagctgagaggatttgagactgagcgcgagggagggaaggggtgaatgtgtcgaggctcgttggctgcagcgagccgacgagacgatctcacaggcagcgcggcaggcggcgagtcggcgcgggcggccggctgacttgccgtctaagtctgcttcgagcccacgccaagaggaaatcatctatgagcctcgcgcggccgcccgcccaacgactcgcttgccctcctctcctgctctctcctcacccgtcctccacctcactctgccagccatgttcgcccgcttcgccgtgagtagagtatctggcaggcaggcatatgcttcgatgcgttcggtaaaagctcggccattgacgcgctctgctctgcctcccatcgctcgacgaccttcagacccgcgccgccgctgctccgtcgtccgtccgcacgctctcgacctcggtcgttcgcaagggtgcgtctttggcctccgttgtgctccggcgtggagaagcatgagctgctcgttactcgtatctccaccccgagtcaagcgatcggtcccgggctgacgagcgccgcgctccctttcgtccgcttgcgagatgtagacctcgtccaggacctttacatcaaggagctcaaggcctacaaggcccctgaggctgtgagtccatcacgaagttcgggtccagcgtctcaccatgcgtccttggctgacgaacctactcgcccgctctcccgcccgccgcagtccaagacggccgctctctccgccgtcaagcatttcaacccgcccgctgcgccctcggccccccactcgctctcgtcctcgctcgcgtccgacctgtcgacgtacgagtcgacggcggttgacctcgcgcccaaggaggccaagcacggcaagcagggcgaggagattgtcgaggagcggacgctcgacagcctgttcgaggagatgaagcagccgctgccggcgcctactggccaccactagatgcggtcgagcgagcgagcggagcgaggagatgctgggccctctgaacatgtcttccggagtgcgtgccgatccactcgactttgagcgagcgggtcagcgcatgcggctgacgacctgctcgcggttcttcagattcgaccgggaccggagccttgcaggaaaagacggcaggagccaaaggcgagaggcggaagggagacggactgtaaataggagaagggggagggtgacggatctgtcgctatgacccccgcctttgatcacgcccgagggtcgtcaacgatccccctaagcgcgcggcccggttgagggaggtgggctaagctggcatggaattgcgaccgtacgggtcgactgagaaagaccagcctctgcttagccttgagcctaagtgcgacaggagagacttacgtcgttggcagctgacagcgctgccgcacggctcgtgccttgctgcctcgttctgacgcgacctcctcacttccatcctccatcacctcctttcctgctgcctccatactctcccctccccaggcagctctcccagactccggcctctcgctgcagtcttttccgtccctttttgaacatggcctcaacgactccggcagccggctcgagcggcgcgctgtatccgtcggcgacgacgaagacggccgacgacgtcccgtccaacccacgaggcatccccgccgcgcccttcatcgtacgtcgcctcgaacgaggctggtaggcaggctgagagcttcatcgaggctctcgccggctgacaaccccccttcttcgtgtgtctaggccaacgtcgaggagcacattggcggacccgacggcgactgcgagggcgcactacgcaagttccaggagatgagcgcgtgcgttcgacctgctcttcttcatgtcagggaccttgggctgctcgggttgcacatctacctagaggccgttgagagtagccgcccgagtaagagcggagcccgacatggtcgtcgctcctctcgcgcccttcgagctctcgaccgcttcgaccgcatcgactccgagctctagcagtgagctgacacgtcctgctcgtccacttcgcttcgcatccgatctctttcgcgcgttgcgacgagcagcaagtaccggtatatggagctcaacctctcgcagcggcgcaagggacttgaggctaagatccccgacatccggcggacggtcggcgtcgtcgagtacctcatcagccggcagaagggcgcgtcctcgacggcggatgagctggacggcgaggatgaggaggacgaggacgacaaccagaagccgatcaagacgctctttgagctcaacgacacgctgtttgcagaggctgaggtcgaggagaccggcacggtcaacctttggctcggcgtgcgtctcgccctcgcggacccgagctcatctggtcacctgtcgctgactcgtgcgtctgtcttgtttgcttcaggctaacgtcatgctctcgtacccgctcgccgaagcccgcgagctcctcgcggccaagcttgccggcgctgagcggacgcttgagaacgtcggcgaggacgtcgagtttatccgcgagcaggcgaccatcatggacgtcaacctcgcgcgggtctacaactacgatgttaagcggtgcgtcttccgtctagcgctcttacctgcgtaaaaggagtccgggaaaggcccggaactgactcgacattctcttcactgcgtaaccgacgtccgacctcatagtcggcgagaggccaaggagaaggcggcggaggagggccgggccgaggagatcgaggacgtcgactgatgcgatcatgcatgagaagcaagaagctcagggagttgacacggctgggctggggtcgaagggaggaggacagggcggcagtccttggtcgcccatcgctctctcttagagttgcaagattgaaactcgtcagaactagcgaagggtacttgggcggcgcgcgcggacgaatccgacgcacgacccgcaagcacacctgccgacccgaccatcactgcctcacgccctccgcttcacccccgtcgcctctctccgccaaaccttcgcgatcgaggtgctctcggaacgaagaggcatgtcgtggaaggtcaacccttacgacgagccgccagagactttcgacgagtgggtgcgttgagctcgtggtcatcttggccagcctccttaccgggccgagccagtgtcgaagggagccgctcgtctgaccgccattttgcctgctcccctctcccaggtcgccggcattgaggccaagattgccaacgccctccatcctccacgccagaagctcttccccgagcccgagccgatacgaacggttgtccttcagcagcttgcgcgttcggtcgagcagcctgccgctgctgccgtcgacgacacccatcatgacgcgctcgacgacgactcgctctcgtacctgaccgagcctctcggggcagagatccgctatccagatcttccggtcacgatcacggacgacgaagccggcaagcagcgagacgtcgagcgcgacaccgcgttcactggtggctcggagcgaggcgagcttgatgacgaggacgaggacgagagcgcaagcgaggacgacgacgccatcagctcgctcgagtcggaccaggccgatgtcgtcctactgtcctcctctgaggatgaggacgaaagagaggaggcgaccgaggctgcgtccggttcagaggccgaaggggaggagagctcagatgagggcgaaggcgctggtgagttctccctcgtccctcacgcggtcgctttgcctcttagctcgccctagctgacagatcttgtagatcctgataccctagcagagtacgactcggacggcgacctcgtacctcgtgcgaccaagagcctgctcgacctcgaggcggccatcgcagacgacgcgtccgccgatgacgacgacgacgccgcggctcgactaccccaggacaactacgaggacgtcgacgacatgtacgaggacgacgccgatgttctcccgccgcttgaggaggacgatgcggctctactctcggccctgccgccgaatgcgggcgacacagcgatgcgcatggctcagccgaccggtttcgtctcagccctcagcctgcctttgagcggcccatcatcggtcccggctctctcccctccagccgctgcctctccatccgcggcaactcccatcgactcacctaccggcacgccagaagtcgaggtcttcgagctgagcgactcggacgacgaagacgaggccgaccagctcgaggatgtcgccccgccgagaagctcgcgcgccgagacggaggatgcggaccagtcgatggacgaggtcgccgatgacggcttctcggctgccttccaagcgtactccgaggccgatgaggcggagaaggacgagctggccgggagcgagagcggggaagagctcgacgaggacggggacgacggctgggccgagtttgctcggcctcatcaggacgaagccgaccgtgtctaccttgctcagccggcatcgagatcagcatcacccacgccgttcgaggcctacgctcaggagcaggcaacctacgatcacccggtcgcccctctcggcccgatggactcgcacatggactcggacgagctgctcgactattctgttcatcctccgacaaccgctcgaccggatggcacgtaccacctcgagacgttcgctccgaccgaagcgctcgctgcggacgacgacacgcttgagcagacgaagcaaacattcgaggtcgatccatcgctgctcgctctcgacgagggctttcctcctgctcccctcgaccttcccgtcctccacgccgaggctcagctcgcagcggaccttgtcgccatcaccggtggcgacctgacgtttgcggcaccgctcgtcgagcttgcctcagatccagagctgggtgtcctctccgagtcgggcctcgtccgcgacacaccgcagtcgccggtcccatcggtatctgccggcaacgtgtcaatcagtctaccggcgaccatccagtcctgtctgcctcggcaggatgaagtcgcgccgatcgaggtcgagagcgtcgacgcgccttcggaagcgagcgctgttgccaacgactcaatcgatttctcttctgccgcagcactgttcaccgagctgaggcccgaaacacaagaggcggcggtcgacatctacgccgatgtcgacgtcgagtcgcaagccatcttggctgtcgcgtccgagcacgatgagctcgacgtcagtccgatggacgcagaggatgacgagggagacgtccgaagcccaagggtggtcccttcggcgatttccgacgtcggaccggtcttgccaccaagcccggaaccggccggtgacgaggagtcagaagctacaccgttcgctggcgcctccggtacgtcaccggtggatgaggcaccgtcgccggcaatgactatcgaggatgagaaggacgagctcgaggatagcgacggctccagcgcggtcaaggtcattggctcgacctcgtcaacggacgacggcaacgacgagaacggtgagacggcgagcgaggccgaaagcgaggtcgacgacgaccgctctgtcgcagaggaggaggaagatctggctcctccggcgccggtcgtcccgccgcagactcggctgcctctcccgctcttgcgcaagagcacagagcaagtggctgcgacgcatgcccaggcaaaccctttcgctgccttgacggtcgagggcttgtcttcggacgacgagagcggccgtagctccgaccaggactcagtcggcgaagacgatcgcgacctaacgccggtgacgcagaagctcgaactcccagacgcgtttgagctcgagcacgaacaggcgatgcagccgcagtatgctgccttacaccctgcgacgccgtcggtagccgacgtccggtcgtcgacaccacctgcgatgcctctcgtccaaaacgacgtgcaatttgcatcaagcctccacgagcccgaggtacggttagagcttttcagagtctcgcttgatcgaccgctgactcgcgttgaccttcgcagccatcggagccgctgttgccggcatctccgattcctcgatcctcatccctcgccacggctccctcttctgacgagcagatggcgcactcagtgccgcctgcgccgatcctgtcttcgcctatcctgccctcgacgccgccaaccgcagtcatggacgtggacgcgccaccactagagtccttcacctctggtacccgcaccccggtcgacgagtttgaggccgaacacgaggcagcaatgcagcctctgccgtctgccatcctcgacgtcgaggtcgaggcggccgaggagcacacggcggggctcacggtcgccgctctgcactcgctcgacgaggtcgagcgtgagcatgacgctgccattcagccaaaaccggcgctcgtccgcgaccacatcatccacgacgaagaggagacagaggcctcggcctcggcctcgggttcgaacgagatgtccttcgtgcgtgcctctcgaccctcaagtcattgatcgctgccatcgctgactgctggcgggcttcatcgctcacaagggggacgaccccgtcctgccaatctcgaccccgctccatgagcccggagaggtatccatgcctggctacgtcgagccggcagacgagcccaacctgcccgatgccagggcagagccggagcccacgatcctcatcacgcctgcggtcccgcacgtgtcggaggaagagggcagcgtgatggctgagccggccgacactcgcccgacgacgccagaagttggatacgtgccgccgcagacggcgggctttgaggccgcccccataggcttcaccccctcatcgctgaagctcgatcggcctccgtcgcctaccttcactatcaccactgacacgtacgactcgatggacgcaccgcccgccggggtcgaccaggaactgggaatgtccgccatcgacgactcgtacgcgggcgacaatcagcacgagagccctgacgacgccggctcggatcacgacgcggttcgcccgacgaaggcgcccagcgtccagccttcgtcaacacctgataaggacgaggtcgccatgacggcttcatctcccaatgctgccgttcctgcagcgctggccggcacctcctcgggcttctccgcagccggaactgtcgtcgtcgaggctacgtcggacgaggacggcgacaagactgacggtggctcggagggggaggaggtcgatgaaggctcggacgacgacgatggcctcgtcctcatcgagtcgcggcgactgagcgcatccagcgcgcccaggccctcaccgcctacgccgccacgagtcctgccagagcgctttctagcggccgatgtcttttccgaagcaccggaggagctgccgcagccgccacaggccgagacgacgggcatcacggagcactcgtccgacgtgcgggccaactcacgcacgctatcctaccatcatcacggctcgtcatccagcagcggccctttgaccatcccgcgcacggccgtcgtcgcgccccatgccggcacgccctccccacggaagcggatggtctcgccggctcggtcgatccgcgcaagctcgccctcccgcgtcgcaagcagtccagtcacccggtcgcagtgcgtctaccacgtcctcgacctgcctgggccgaagaccggccggacccggttcgccgtcccctactgtagcctctccgacgccgacgcgatccggcacgaggacgccaagatttgcggcgtcgcgactcccgaggagaatgagcgcaggcgaccgctcaccggcgagggcgctgtcgacattgacgaggccctcgaccaggctctgacacgaatcgtgcgtcatccggcacgtcgacgtagatcaacgtgattgcccgtgctgacctgcgcctcacactcggtccccacaggtcggcatcgacatggtcaaggagggtcactgctttttcctcgaccgcttgccgcccgcaacttcccctcaaagcttaacgcggtctggcgacgcgctccctgccgaatcctcggacgtcgtcgatgagcccggcacctccgaggcggccgacatggagacggacgatgctgccacctcgcccaggaagcgcaagcggtccgaagccgacgagcccataccaccctcgcaagctgctaccaaaggctcggacgctggggacgacgcggacaagccgcttgttgccgagcagctcgaggcagatgaagagcaggccggcgaggaatcgtcgtccaagcggcagcgcatgtcagaggagcccaccacagcgcctgcaccctcccggcggtggtccttctggcccttttcacgatgacgatctgatgccaacctttgacgaaccgcgtgtcgactgcttctcaaccttgggtgcttaatagcagtcagccgagtaccgccatcgaggaccggtcgacctactgcgcgcgtcagcgcgccctccaacagtgatgctgcagacgccctctcggtcatcagacttgcatgctgatgagaaggtacgccttgctcgcgcctcttccacaaccttctgctcgtcagagggctgtcaccttgcgcttcagcggtggttcggcctcgacgtgctcagctgctggcgaagcggagaaaggcggcggcgcgagtcgatgccttctcacgcctcgacaccatctgctcgccgcctccgaccagctccttccactaatagtcctgctagcaacccatccagcagatccatatcagctcaggtacgtcctcgcgcgtgtgccagacccagtgatctggccagaaaatgtctgggcctcgcgcgctgacggctcgcttgctcgcccgtcggctcatccgcaggctcgacctcggacgctcggccatgtcggtccctcagagcacgtccaagaaggatccggccgctcgagccaggctgcaagcggcgcgagctgctgctgctgctcaagccgaagccgaagctgcccggaaagccgcccatcaggcagcccaagctgtgccactgcccccgagctcggccggctcgcatcagccggcccttggaccccctcatagcccagtcccatcttcatacaacggctcggtcagctcgcacttctcggcccaaacggtcgttccgaacaagcatcagcaaccgccgcccccgcaacagcagcagcagcacctgtatgccaactcgagccacgcaccgtcccggacgagtctgagcgtaccggctggccacggcgggaactatggtcacctggcccctgcgaacggtggtgcgagtgcagcgcaagggtcacctcgccaagctacaggaggccggcccttgagctcttcggggccgccgcgatcggcgctgatgcaggcgccagggatcgcgcactcggcctcgcagggggcgctgccggtctctgcggcctacaacctcgaccgcggcctgccgtccttctccccgacctcgcctcgccccgtatccatcggcagggagccgcctgtagctcttcatccggcgcctcggcctccgcaggccggctacccgcaagatccctaccgccagcttgccgcgccggtctctgctccgccaatcgcgcagcatggtgcgccgtcgctctacgccaacgagtcacccgactctcgacgcaacacttgggcttcgctcggcccgatggaccctggcacgagtcctgccatgtcgacttacgcgccatcgacctacggcggaccgtcgaatgcggtcgctggcccgtcgagccaggccggaagcgacgcgcccgttgcctcggccaagcgcagtgccgagtccctgatcggctacgtccgtcagatccgacacgtcctgttccgcaagtcggcgacggatcagttcctgatcgtacgtattcgctccagcctcgtcgtgcttcgcctgagttgcgcaccgcctgaaccccgcccgtttctagcgcacgattgacgttttcgcgtccaatctgatgggccacacccaacggctcatcgctcgcgagatggagcttaacggcggtcaggagaatcgagcgctcgcgagcatcgcccgcgactttgacaaagcggcggcgtggatgcaggagcatcagcagtcagttcactcgatcaagcagctgccgtttgcatcgctgacttcttgcgcctgaacccagggacatcgccttcaattggccgccggatcgaaccatcaaggccctgaaggagatggatgagaggttgaccaaaggctcgttcgtgcgagcgaagcttctgtcgatgagcgatgctgaccctgcctgccgtccttctcaccggccctcagccttcacgtccaagctcgccgtcgccctctatgaggctgtacaggacacccgccagctctcgatgcagatctctcgccagctcgatggcctggacggcctcgtgtcggacctcccgggcatgatcaagcgcatcatgaggtgcggatccagccactctgctcgctcaacacttgggtcactaacctcacgcaacccttcttgatcggcagccaagccaactcggccgagattgacgagaccatctcgcgccttcgcgtcgaagaggacgctttgaaaccggtcaacggcgcgcagaccggctacggcggcggcgaaggcaagtctcaaaaacgcgtgcccctagtccttgccgacgcgctaacactctcatgtcttcccacgcgtttcccttgcagccgagaagagtacgttgttgacaacctactgagaggtgtcgtgcatggcactaacgtttgacgtgcctgtcgcagccatccagagcttgctcgacgctctcgaggcgctccggctttcgcaggccgacaaggagcttcgagccgccgccgaacaacgcctgctccaccccaacggtcagccgacagcgcccgctgcgaacggttaccatgccccatctgccgcctctggcggtcgaccgctcgacaatgaccaggcgtcgatgcgctccttcagaagcgagactgagctgtcttatgctggcccgggcccgggcggcattagctacgcgcccaatcaatcgctcgctcaggtagccaaggctgccgagagctggccagacgacaagaagatgccactcgacgacggcggcatctacttccaaccggtcgacccgatcaccaagctcgagctcatcgaccccgtccttgcggacgacggctgcatgtaagtctcatctctctgaccgcctcgactcgagatcgatcagctgacggtctcctgcagccatgaccgtttctcggtcgtcaaccatcggccagagaacccgctctaccctggccagccgctgcgtgttctcggagagtgagtgattccagaggggccgattctggtatcggccaagagtcgctgaccaaagtgcacgatctccttttgcagcgtcctacagctccgcaaggccatctttgcgcgctatccagaacgcaaggacgagtgcttcgaacgccgggcggcctacctcgcatcgaccgtcaaggagtacgacgagggattctcgttcctcgatgtcgtcgacctgctcgacaagctgtcgactgtcctgcactggcaaactggcgaagaggactgtggcatcctcgtccgacgtggcatgctccgctggcgccttcgcaacctcgccggagcgcgggccgacctgcagctcgcgctcaagctgtcgccgaccctgcccattcatcaccttctcgccatcgttcagctcgagcttcggaatcacaaggacgccatgagcgaggccgagcttgcccttgcgcgtgatggccgcgacagcgtcgcctgcgccgttcggtctcagatccactcgtactatggccgaatctcggccgcgacgagagacgccgaggcggcctcgcaatcagccaaccagtctgacccggaccacccgcagaactcgcggatcgccaagacgacgtacagcccgcatccgagccggacagtgcccgacacgcccttgcccgaactgcccgaccttcccaacctgctcgctgggttcgcttggctcaggtacgagcgcatttctatcctgtggtgtctgtcagcagattgacgagccgactgtctacatagcctgggcgagccgatccgagcctcgaaccacgtcgctcagagcgtcgaccggggtgttctcggcgacccttggccgcgctgcctctggggctacatcctgacggtctcttcagaggagacggcagcacgcgaagagggcctccgcgagctcgaggcgtcctggaagctctcgggcgacatctggcgcaaggccgacgacgacggcggcctcccggtcgacgcaaggccgctcaaggccagcattggcattcttctcgcccaggccaaggcgcagaacgacaagcgggcggctgcagcgatcctcgtcggctcgctcaagggccagcacccactgcaggcgcgcacgagcgaggaggttggctttctcgccggcctccatgccgagacaggtacgtcccgcctgcatcgcgccgagcgacaaagtccagatacgtactgacgccatgcacgcgataacaggcgactacgagagtgcgtcggccgcctacgacgaggctatcttcctcgcttccaagtcgggtcgactcgacgagcgcgcggccttgctcgccgagcgcacgcgccatggttgcgcctaattactctgatctctcgtctctctttgggttgtatgattatttgatacagcaaagaggaagtggaaggggccgtgtgggcgatcgtgcgggtcggacggggtctattcgaatacatgcgtgagagaggggttgcgtctaaaagttgaagtgcaaggaatagtcgaaaggggagagagataagtgagcgagcgtttgaaaagagtctgccagcggatgagatgagagaaggtcggggaagatcaggccgagcggaagtagccaacggggtccttttcgttcaggccagcctgcggcgttgctgtcgttgtgccaggtgcctcgcgggcgtcccagtaggtcgaccggccagttgcgggggtgtaaagcggtgcctgaccgtcgcccgaggggtgaaggtcgccagcgtcgccaaagccgccggcgttcgtggcatagtggctgtctgccgtcgtaaacgatccaccgctgagcggccgctcggcgaacgttgacgtcgacgcgggcggggcggcaatctggtcgtacgtgtacgagtgcggggcgttctgggctgcgcgatcggccgagtagccgtcaccgaaagtcgggatcggctcattcgggccagtcatagaagcacccgccggataagcgtcggtcgaatgggtaccaattgcgtacgctgggtcccgctccttctcgagcatcaccggtcggggctcctcggcgagctggatgtcgcgcgcggcctcgtcgtcgatggccgacgtcggcgtgtggcgtttccagaggatgccccagactgtcgcgcgcgcagacaagcgggtcgatgtcttcagccagtggtcagggcaggcccacaaccccgagagcgactcacagaggttgaagatgaagccgatgaggagcatgatgacggcaaagccccaaacggcgacgcagacgaggcccatcaccgtcttgacgatgcccgaggcgccgaggcgagggaagaaggcgagcatgagcccggtcgcgacgagccggaagagggcgaggccagctgagagccagtcgcccttcttgttggtgtgcggccggacagcgacgatcgcgatgaaggtgaggccctcgatgatgatgagggcgatgatctggacgagaccgtggccgtgggcaaaggcgatgaagcacgccttggcaaaggcggcaaagagcatcggcatgagccagaacgagtgctgcggccgccggtactgctggtagagggccgagcagtgcggccggaggtttgggaacggcgaccagagcgaccggggcacctgccggacgttgacgacggcccgctgggtgtggttcgtgagcgtgacggacgagttctcgcgtccgaccgggtcgggcgaggcggcgctcgaggtctcggcctcagcctcagccgtcatgctcgggtgaagagtcttgtcggtgtagccggccggcgaggcagcgatgtggttccgggcgcggcgggccgcaagaaggatcgaggcctcagcgagcaggagtccggcgacagtgatgaagagcgtgatggcagcgaggaagatcggcagccaggcatcgctcagcgtgaactggtagagcgcgaagatgcagatcgggaagaacactatgagcgcctggggagggaggcgtgcaatggccagcgtgtcagctgcttgttgcatgcggatcgaacgagacgcagagtactcacgacgcgaagggcgttggcgatgatgacaaacttgtagtttttgcggagacggccgacccaccaggcatcgctgctgttgcggtcaccgatgtaggcgacgtgggcccggcgccgggtgcggatcgtgtcggccgcccagacgatgaggaagccaagcgcgtggacagcgaggaagacgccgaggatgatgagccacgtaaagaagacggtcatgaaggcgttggcggtcgggatgccgatcgactcgacgtagacggggaggccgttctggatttcggccgcggccgccgtcgtcgtcgcgctgtcgatgggcgcacgccggccgagcgcggttgagggctcatagtcggcgaccggagccggaagcgtcgacccgaggaagtcggcaagtcggttgtacgtcggcatgacgtagcctgcgagcaggggcgactggctcgaactggccgagccgccgatgccagagtggtagcccgtcttcttgttgatgaaggcaatctcggggtaggcgttattcgacatcttgccgccggtctgagcccgggcgctgttgatcgtccgctgaatgctcggcgtcaggaagaggccgagcgcccaccggaagttgaggacaaaggccgagaagacgttagggtagttgatgttgagcagaccgacggccgccatcgactggaacaggtagacaacgtcgaccgcacgccactgggccgggctcgaggtgccggtgacgagtccgccggcgatgagctcggcctcggtcgggccgaccgccgctcggtcgcctgccgtcagcgtgagcgggtcgagccggcagtagttccaggcggtgtggagccaggcgaggatgacggcggcgagcgcaaacatcgacgtgccccagagaacgcccggctggcgagttgaccagccgttcgagagcgaggcctggaggcaggcgatctcgtcgcccgagatgacgtcccggaagcggacggtgacgtaggcctcgaggttgggcacggtgtaggcgatgctcgggatgtcgtcgacgatgcccgacggaaccggcagaggcgagccacctaggaggatgggcaagatgcggcctgagcgtcagcctacaatgctctcgtgcgaaggcgcgcagtcgagcctagggaggacgcaccggtaaagttaatcctcggcagcgggcaaaggaggccgtcgaggtacgagcagacgttgatcgaccagttgctcggcgtgatgccgtagatgtcgagcgagatgacggcctccgggttgaggttgtccgagacggttgccgcagagagctcgaagacggccgactgcaggaagacggcacgacggtcaggacgactgctgccacagaagcggccgagtcctaggccgagcaaagacggacctcatttgcttggaagtactcgaatgagaacgagctgacgaggatgccggtcggcggcgagcagtacgtgacggacgaggtgtctgcaagacgatttggagcgccgagcaggaatagacagtagaggagggccgtcagcgtcgagcaccacaaccagtagtccgacgctacggcagttagcgcagcaagccgcagtaaagaagggcggcggccgatgctcgatatcgccgagacggcaagcgggcgcatgcagcctcgacggacggagctggtggggcgcgccgcagccagagcgagcacaaagaggagtggcctgcgactgctgggagacgaagaagagcgctcgagacgtacagaggttgttgccgatcttgctctgcaagctcgccgagcgaggagcggcctcgacgaccgatggcaggtagacgagcgcccaggcgacaagggcgaggccgaggagcgacgagcgccggtgaaggccgggagcagcagcggccatccttggcatggcaatcgatggcgacgagggcatcgaggcggacaagaaggcccagggctggcggaggtgcgaggtagggcgaggagttggcttcctaaccaacagaaggcgcgaaggtgatggtcgctttgaaacgaagagagagggttcgacgacgctagggctgagaggggcggaggggtagacggcggccgatcggggacgtgcaactgcgagcgagtcagcccacaggcgagcttcgcttgacattccagtctccctctcggtgaacgcaccggtcgagagcgggctcgaggagagtcgcttggggacgagcttgccttgaagagaggttgaggtcaagagggaggagagagacgaggagaactgacaggagcaggtcgagctgccccggagagctggctccgacgcgcaattctcgcccgcgggagccgcgcaagctcccgactcgagccagcagacgtccgcgtcatcgcctcgcagggggaccaatggacgcgtacgagcagccacgtcggtgagacgagacgacgaatattccagtgcatcgaacataaattaggcataatgctgattagtggacagtcggcgggcatgtgttcaggaaggaaggggtcgaggccgttaggcgggaggccacaggatgaaggagagcgaacaatgcccgagatgacctgctcctctcctctcttcggccatctctttgcgacaacgagaactcgattgcgacgagggtcgagtggattcttgagccagcctcgcagccgcgcctgttgagggacgcctgcgggcacgcgcgcgccgccgtgtctttcccgcttcaaacgtccaccagcgcagcccttccctccgtccttttcccttccctccgcgccaccctccctctgcccatcgaaacccatccacatgcgcaacacatctgcccggcaggccacgtcgcgggccgcgcttgaggcgctcaaaaagactgagcttttgagccagtgcaaggtacgtcgtcgcgtcgcccgcttcagcccacccttcctctccatccttgcctgcgccctcctgagcccgtgatcagcagggggagggtgcactcacctcatacatggccccatccaccttcccggtcactcgcttggccctcgacgcgtctctgtcagcctgtcgactgacactttcccactcttcccacctcctcccgtcaccgtttcgcacgcgtcgcatattcttccggtcggcccttcctctctcgcctcgcctcgcacccacgtcgcaggcactcggcatcaaggcgacgacctcacagcggaaggacacgctcgtcgacttgatcctcatgcacggatcgcaagtagagcccgagggcgagcacacgctcgtcaacaccagcgacgacgacgaacaggttccggccccttcgtgcgtcccctaagcttcgcattcatccatccaccttacagaaggtgcttatcaactgtcatgctttgctttgccacccaggccgcttcccgtctcggccgagcagtcaccgccgccaccgctgccggcaacgcgcggcaagggcaagggccgcagcgtcgtcgcggccacgacatccatcggcagccggtcgtctcgcacaaaggcggcgcagcgggtcgtcgagccggagatgatcgagatggaggatgaggtcctcatggttgaggagcctcagccgcggcccgagagtcagtccatcaggtctctccatcctgggctgcgctgcgcaatctgtcgctgacgccgccctcactgcgaccatggcaggctcgactcgttcgacaaaggcacacgtcgctgccacaccagcgcgcgccctctcaccagcggtttcggatgcacccgctgccgctgcacctctgtcgccagcgccagtcgtccttagccccgggccggccgcgtcgacctcgtcagcagagaacgacctgcttgcacgccttccggagctcatcgccctcctaccgctgctcaatcagctaccggcagccctgccagagctcgccgtccggcagacgaacctcgaagcgacggccgagacgacctcggcctcgctcaacaacctctggagcgaggtcggcgagctcgacggccggctcgccgctctgatgtcgacggtcgacaacctcaaggggagcgtcgataatctctggaaggagctcgataatctcgacgacacgggcagcggctttgtccgtctggccgacatgaaggtcgccctgagcaagatggagacgacatgggaaggccagttcaagcgcatcgccgaagctgtggccgcgtcctcggcccctcgctcggccgctttgggaagtactagcagcgccggcactccttcgcggtccacctcaggacttccggcgtcgctcgccggcaagcgtgcgcgggtcgagtcgggcccttcatccatgccttcgtcggcgtcgcattatagccagctcggcctcggattcggccgctcaaatgcaccgcctgttgctaagcggccgcgaatcgtctccgagatggccgtcgagcggttgatcagcgacgcagacggcaacgacgacgacgaacagctcgaggacgaggacgacgaggtcgtcgtgcgtccacgctcggagtcgccaccgacgctggctgaagcgtcgcctgcccgccctgcgccgccctcaacaccgcccgctcgtgcttcgccggcgctcgcgggccgagtcgatcctaccttcacaccttcgacgtcggcctcggcctcggcgtccaaggccgctgccgctgccgctgcagccgcccaccaccaggtcgggccgtttccgctctttgcgacctcgcccaagccgccgcgggacgtgccgctctcgccgacgtttgagtcgcccagacggacgacgtcgggctcggcgacggccgccaacctgacgctcacgcccggccgaaccctcttctcctcgggcggcggagccgagacgcctcggtcgcgcgccgctcgggcgaagcagcagggcatgctcccgcccagcacgaaccttacgcccggccggcggctcgcctttgatctcgcgacaacctcgaccgccagctctgtttcgcccgcccggccctttacgctcggcccgagcggcatcgctggcgagagctccacagcgacagcaacgacgaccgcccggccgacaggcctcagcctcctcccttcgctcccgctcgacagcggcaatacggccgcctcctcctcggcctcctcggccacggcggccctcaccccgccggcgctcacaattctgacctcaagtccattccccttcccaatcccgccgacgccgccgcgcgtcagtgcgtggagcaggccgaaaaacgtcgtcccgccgacgccgccggcgccgcggactatgttcggcactgagcgcgaccgagacgatcggttcggggacgaggactagcaatatgagcgctcgtacctctccgtctctttcgtctctgttcttcgagacctttgcttcgggccttttggcccttcctccacctttcgactttgcccccccctcctttgaccgccccgcatccttgtaatcgtccagtctcctatataccctctcatcaatccctgctatgtgtccttctatactgcgccagccggtttgagcgcctgggtctcgtctggcagcgctgcctgtcttgcgacgcgggccgagacgtgctgcgcgcgacagcccggcccgcctgcccttcagcccacggccgcccctccgatccgttgccttcagcctctcgcaagagggaaaataacccgattcaaaggttagacgttcttggtcagcgaaggtattcatgcccgacacaaccggcgatagtgggcgagcctgttctatccttggtcccggccggtccatgacgttgcctctcggaggatgggtcgacgcgcggaggcgttctgccaggcggggcgagcaagaggccggctcgtcccaccgtccaacagtcaccccgacacaccctttctccctcatccccatacctatacatccagcacacaacatggttctcggcgttcacagcagcagcagcaagaagcaggaggacgaggccgccgccctcccgcccgcacagcgttcgtcctcgctcccctcttcgccatctgtcgccgcaacggcgcgaggatccacactcgccgcccttcgccccagcgggccgtcaggccaggcggcagacgccctccgagctgccatccgcttcacaatagaaggtctcgatgcaaagcatacagtgctgaccaggtctccttcttgccgtccctgtctcgccgtccctttcgcctggtcggacgtcctgtcggatctccttcgcgtccccgacagaggcgagctggtcgagctttatcaagaggtacgcccgtgttgtttactcttttagtctctgtcggataagcgagtgggaggcgacgaggcgtccaagttgaagagagcgacgtggtgacacggagtgtggggaagctgaagcaggcgccggcgttgccatctggccgtccatccctcttgtccaagcaccctctcactgcccctttcggcgagcgacgttctgtcggggggcgcttctctcctagaccctgcgctgcgctcgtcagagggcttgtcgctgctgcatctgcaatttgccccggatccgctgcgaggagatgggctcgctcggctgcaagggcggctcggctgacccaccaggcttcaaccgttctccccacctgcagtctcgccggattttcgggcgacctctcgtcgatgacggccccgccgttcattctctcgcccatcgtacgtcgcctcgccgtttacgaggcatccagtgatcgcctgctcagtcggtagattctgaccgatgcgcctacgcccactgcgctttgaccgcccttccgccgcacagtcgctcaccgagttccctgcgtattggtgcgaacggcccgagatgtttgccgccattgccgacggtaagactcccgaggagcgggcgacgctcgtcctccaatggttcatcgtgcgtcctccgtcgacttgcccgcgtcgcccctctaccatctttgcaataattgacctgcggcacctgcttgtcatcccccagtgcaccctcaagggccagtacatgagccggaacgagaagctcggtagcgaaaagaagtcagtcttggccgccgcgctcgacatcttgcctcaggtcgccttggctgacggacctttgacccatccgtaggccccttaacccggtcctcggcgagctctttttcggccactggcccgaccgcaacggccggggccagacggacctcgctgtcgagcaggtttcgcaccacccgcccatcacagcctactacctcgagaacaagaccaagggcatctcgctcgtcggcgcctcgggccagaaaacgtcgttctcgttcccctcgatcatcgtccgccagaacggccacgcgacgctgacggtcaagctcgcgtcgggcgagagcgagcagtacctcatcacgctcccccggctccggatcgacggccttgtcaccggcagcccttacattgagctcaccgacacgagcaacatccagtcgtcgaccggcttcctcgcgaccgtcgtgcgtacacctttgctcttcgaccatgtttgttcgccgatagctgacgcgtttcgttgcgtcagaactactctggcaagggctacctgactggcaaggcccacacgttcaaggcgacgctcgccgacgcaagcggccggaccgtcctgacggccgacggccagtgggataagacgtccaagctccacaagacggagaccatctttaccgacgcgacgcctgccaaggaggaagtgactgtcggcccgctcgagggccaggaccagtgggagagccggcggctttggaaggacgtcgccgacggcatccggaccggcgactttgacaaggccgccgcggcaaagacggcgatcgaggttgcccagcgcgaagcacgggcgcgcgagaagcaggacgggacgaactggcagctcaagctgtttgagcacgtcgagagcgacccggactatgcccggctcggcgcgctcttcaaggcgtccccggcgaccgaggaggcctggctcttcaagggcccgctgccgaccgctcagcaatagacgcgaaccaacgacccgcgttccctcgacgttcgccccgcttgcgtccctctcagcgtttgcggttgcccgaatcgacaggctctcgcccgccgtcgcccctttgacccccttctcgaatcctgctgtatccctcgcacacgtccctcctgcctctctctgacttcatagcctcgcccggtagagcctgtcctacgatgcacttcgtctgatggacttcttctctgctgctgttcggggcgctcgtccttgtgcacttgtcgggcgagggtgtcgtctgccgcccgggcgcgtcgacgaaccgcagccccacccgacgacaatgatctcctcttcctctgccacgcaccgaattcttgcctcctcagccacctcgcatcccgctagtgtccccgcaacaggatggaccaacagccgatcctgacgagcgcctcgtacaacactccgctctggcagaggggcgccgcgacgccgacgacctacgccggcgccgggccctcgtcagccggaggctgcatggctagccctgccgtcgacgacgagcagccggtcggctacgaggcacacccgcagatccaggtcggtaagcccgaagtctcttggcggtgagttctcctctgggctcgggccgtcccgagcaaggctcgagtagaaagcacgggagctgacacggagagctccttgtcggctgcgctgcccacccccaccttgctgcctcggccctcgtctgtgcggttggtcaggtatgagatgcgccgcgaggcccagctcatcctcgacaacctgtatctcggcggctaccagtcgtcacggaccgtcgacggccttgacgcgctcggcattacccacatgtccgtccttggcttggttctcgagcgctgtagagacgcaagcttactcgccgccgcttggactcctccctcaccttcctccttctagcgtctgcgtccgcgaagagaccgaggcgatgctcgtcaaaccgcgcttcccgggccgctatcaatacttggtgctcgaggtcgccgacagcgaggtctgttccctcggagccagcgcgcaacctacctggctcgtgcgctgacacatgccctactcgcgccggctgcccgtccccatctcgttccccgctccaggaccagaatctgatccgcctcttcccctcgacgtgcgactggattggccgcgccatcgccagcggcgggaccgtcctcgtccactgcagcggcgggatcgcgctggcgccctcaatcgtctgcggctacgtcatgctctcgcagcggtcgacgtttgaggaggcggtccggtggacgcagcagaagcggtactgcatgtcgctcaacatcgtgcgtcccgctcgtctttgtcgtcctctgtgggtcgcgttggccacggccgagcgcgcagctgaccatcctccttcgccattgaatcccaacgccctccctcagggctttctgaaccagctgcgtgagtacgaagccttctgccgagcgtccctcgctcttccaccctcctcgaacggggctgccgacgccgaccagccagccgagcccgatcaccgatcccggaaacggacgaccgacacgctttacgacgacgacgacgacgagatggacggcggagacgagtacggtcggaaggctgaagggagcatcgatccggcgacgggcatgcccgagcatcggcctgtgcgccgcgtccagcgtctcgggccatgaagccagcctcttgcaaacgacgtctccgcctgcgagccggctggctccctcccctccggacccttcgctgctgcgacccccgcccctcatgcccgtccatcacgatctgcccactggctcgtccgctgccgctcgctccctttccccatcacgccacacccagcctcctatacgagctctccctcgcctcccactcctcgccagttgtaccgccttgccgcccccagcacctctttacgacccttcgcttcgcacgccgtttccatgaccgcctttcgtcccactgaaatggacgaggcgagaagtgacaattggatacagaggaagagggagccgaacggaggagaggtcggaaaccggggaatcaagacaacgaggacgaaagcgcgagggcgagagcggcgacatctagggtgggtggcgtagcggagaagtagtccaagagagagaggaagagcgcgaagccagtctagagcaggccgtgagcgatcgcgaggttggcgagcttgaacaggccaaaggcggcgatcgcgagcaggacgacggcgacgtagcgctcaatgtcccagaagacgagcggctggaggatgtcgagcggcgagtttgcgtttttgcgcgtgccgtatgggacggccgtcgaggtcatggtcgacgggccaagggcgggaggcgtgatgccaaagtcctccatgacttgggtcgccgtcagcttggcgccggcctaggatgggatcgagagggttgggtgaggtcagcgctgggacaagattggcggaaagacctgggggagagaagacgcacgaggacgatcgggacacccgtgcccgggtgagtcgacgcgccgacaaagaagagcttgttgatctctgtcgaggtgcgcgcaggaactgtcagctactgcgcacgtctcgagtctgatttggggtcaggcaggacgcactcgggtgagcggtcgtcggccggaagccaaggacctggaggaagttgtgggcgaggccgagaatctggcaggggaagcaagggtgtgtcagctcgtgcacgagccagtcgaagagtgcgacggaaaggtgggactgaccgagccgttactcaggttgaactccttctcccagctctcggcgttgtggatcttctcggtcgcgatgaggctctcgaagtcgggctcgttgcactttttcgaaagaagctcaatgacgagccgccgggcgcgcgacgtgtactcgtcccagtcctgtgggttggcccggtcaatgtggccgcacggctgcaacaaaaagaggacaaaaggatcagcgccagatcagataggggcgatgtatgcaaggcgggggcaactatgtgaacgcacgacgaggacggtgagcgtgtccttgccctcgggcgcgcagctcgggtccatagccgtcggaaagtggacgtagatcgagaggtcgttcggcaggccgtgctttttgaagatgtcgtcgaacgagccgccgtagtcctcggcgaggaagatgtctggcgggcaggatgggcgtcagtcaactggaagagcaggtcgggccgagcgaaatggggagggggggggggactgactgtgtccagcgaggccagagatcttcttcgacatgccccagtagagcgagatgctcgagcagctccccttgagctcgcccgccgccttttcgagcgccttgatccgcttgacgccagcgtccgcctcgtcgagcaggttttcggccgcgtacacaaggtcggcattgacgacgacgacgtcggcgtggacctcctcgcccgactcgagccggacaccagtcgcccggtcgcggccgggcgtgaggagaaccttcgaaacgggcgcgttgaagcggacgttggtgtcagggaacttctcgttgaggatcttgaggagcgtcgaggggaccctgcgaggcgagtgcgtcgtcagccgtggaggaacgcccgaggcgagtgagacaggcggaggactcactgccagaagccgccacggggataccagatgccctcggtgagctcggtgtactggaggagcgaatacgttcccggcgcgtcgtacggcgacatgccctggcaaccgaaagagaaaggcaaagtggtcagcgcaatgctgggcgcgataaaccgttcgaccaagcggtcgcaccatgtacatcgtcgcgaacgaaaagacgcgccgaaggcgctccgtcttgaagtgacgcgaagcgcgcgtccaaatgctctggcgacggtgaagaagaggagggctgcgcgtcagccgacacgctcattcacagccgagccaagagcgtcggtcggaggagccagggcgcaagacgaacctcgaacggatgcagccggaggacttccctcaggaagctcggccggagcgcgcaaaagacgctcgggaagttcttctggaggacgtggatgatggcctgctcgtagtgctggtgggcctcctggaggaagccgaggaagccggcaaagccgtccttaccctcgaagcgctcgacctcgcgcttgagcgcagtcaggtcggtcgagagcgtgaagacctcgtcgtcgtggaagtgaacgcggtagttgggttcgcctgtgcgtagagagggaaggggagtgtgtcagagccggcgagcggaggggggaagcagagagcagagaacgcacacttgacgaggtcgaggtggtcttccatccgctcgccaaggtcctcgtacgtctgccggaagaggtcgggcaaaaggaggagcgacgggccctggtcaaagcgctggtcatcggcggaacgaggaggggtggtcaggcttcgagctcgacaggaggcgggttcgagcttgagagggggacgtacgtagccatcctgctcgatgagcgagcaccggccgcccgaataatcgttctgcaggtcgtagcggaagcgcgagtccgtcagtcggacacactcgatggcatcggcgaacacgcgacgccgccgccgccgcgcgcgcgagccgacgccagccgacgagcagatgacaaaacggcgcaccttctcaaggacggtcacggcaaagccggcctgggcgagccgggcggccgtcgcgatacctccgacaccgcatcctaagaagaaggagaggaagtgcggcgggttttgcaaacagtcagccttgagtggctcgattcccggcccggccggacgcgtgggcatccctgcctaacaccggacggggtcattcaacacgagcaggagcaagggaggagactgaccgacgacgatcgcagtgggcttcttggacttgtcgttggccatgctgaggggtgtgtgcgtgtggaagagagggaaggtgggcgtcggcaaatcgaagggaaacacatgctttcgcaacgcccgatggcggcccagactgcgcgtcgcccgccaagctgacgcaagcggcggcgagccgggcatgggcgacggctggcggtcggatcagaggcagaggacagagagcgactgccagtgcacccggaccggaccagtccagcgaaagacagagaacgctcatcctatgagatcaggaaggaaagaagaaaggttggtgggatggcaaggctttccggcggcgtcgcgcccggctgagcctctgcgactcggccatgctgcatgcctggctcagcaaatgtctcctcccacagctcgcactcgcccaaatggacgtgcgagcgagcaacaggcggcccagaagcgaaataaggatcccccgagtagggtccgttcgcacggccatgcctctgggccgtttcggagggagaggaggttcggtttcgatgtgctcgccagcgtttacgcctatatctcgcggcctcaagcttgtgcgcgagtggcacctttgacgctggcaaggcgggacagggacgtacccggaccgatgctctgcgagatgcaaaggccagggtacgtcgtccgtcgtcgtcgtcgtttgcgggcgagcgtgctgctgctgctgctgctgccgacctctgcgcgcgcaggcaggccgacgatttcgcctcggcctgggcccgaccgtcaccccgcttcggctcatcataccttgacaacgatggaagcgaccctcccagcccggatcctcaagcggcccagacagagtacggcgctcgacctcgccctcggccggcgcaagttcttcaaaaagacggccaagggaaaggtactcaagggtccgtctcgccgtcgtcgtcggcactccgttcctcgccacccccttgctttgctgacaggccgatcgacccccgcctgcgacatcttcagtcgtcaaggagcgctacctccggaaggacgtcacctgcggctctgatttctgcacgctctgctccgccacggtcgagagcgaccggccgccgacgctcggccgggccggcttcggggcgagcgcgctcgtccctgccgggcattacgtcgtgccggacacgaacgccttcctgcaccaggtacgcgtcgtcggcttgcttgctcgctcgtgcgagagctaggactgataactggcgtccctctcctcactttgccggcgctggtggacgcagatggacctcctgacctcgcccttgcttgcgagcctcccgatcatcgtcctccagacggtcctggacgaggtccagcaccggtcgctcccgcttttcaaccagctcaagcagctcgtcaaggatgaggaccggccggtctgggtcttctggaacgaagcgtgccggtacgtgcgcttctgagccggcctatcgtcgtgctcgcctcccttcacgtcacagcgtgctcgaggggtgggggagcgcagtgcggacgaccggaatagcgactgacggacgacgtgcgcccttctcactctcgctcttacagcgattcggcaaccgtccgcaaggagggcgagtcgcctaatgaccgcaacgaccggggttcatccttcttcctccggacccctctttttacgatccgcgactgacttccctcttggtccctccagcgatccgccaagcgatcgagtggtacaacgctcatctcgcccaatcctcctccttgtcaggcccgtcgttgccgaagcggaccgccactaagcaggcgggcgcagcgccggcacccgaggtcattctgatctcggacgatgccgacaacctggccaaggcgacgaagagcggcctcaaggcgttttcaggtatttcggtcgttttggctaagtggagaacgcacggacgcgcgcgctgactttgtgcccgccctgctttcttcagtccggacgtacgtcgagggtctcaaggagacaagtgcggctctactcgacctgatcgccgccaacggtctcggatcgcatgagcacgacgatgaggacggtgcgacgaccggcgacgcaaagggtaagcgcaagctcctctatgccgactacctgccgctcgcgacgctccagtctggcatcaagtcgggccagctcatcaagggctacttcaacgccaacccgttcgactacctcgaggggacggttaactcacgaacttacccgaagggcattctgctcgtcggccgcaagagcatcaaccgggccgtccacggcgacgaggttgtcgtccagatcctaccggagaaggagtggcgcgcgccggggacgaaagtgcgcgagcaggagaaggagctgagaaacgacgatgccgactcggaggccgaggaggagggcctcgacgacgaggaagaggacgagcggaaggaggcggaggagggagcgggcgagaagcaggtgacgggacggatcatcggcgtcgcaaagcgcaattggcggccgtgagtccttctttctctctctacacccatcgcgcctgactggccagtgcgctctcctcgctcgcagattcgtctgccacatcgacgcgacctcgctccggtcaaccgtggcctcgtccgtcgccgcgcagaccgtctttgcccagccgctcgacgcccggctcccgcggatccggctccgcacccgccaggcgccgaccctcctctcgcagaagatcctcgtctcgatcgaccgctgggacacgcgctcgcgctaccccgagggccactttgtgcgctcgctcggcgaggctgagtcgaagacggccgagcaggagagtctcttgctcgagtacgacgtgccctaccggccgttcggaaagtcgattcttgcctgcctgccaaaggagggcgagggctgggtcgtcccgccgaaagacgacgacccgcgcggcgactggcgcgggagggaggacctccgcgagatgatcatctgcagcatcgacccagtgggctgccaggatatcgacgacgcgctgcatgctcggccgctgccgaacggaaacatcgaggccggcgtccgtgagttgccattcttccctcttcggtgctgcacgttggtctaacccctcgccgccgcccgcagacatcgccgacgtctcgcactttgtccaccctgcgacgccgatggacgaagaggccgcctcgcgaggcacgaccgtctacctcgtcgacaagcggatcgacatgcttccttccctgctcggcaccaacctttgctcgcttcggccgtacgtcgagcggctcgccttctctgccatctgggagatgacgcctgaggccgagattgtcaacgtccggttcttcaagtcggtcattgcctcgaaggcggcgtttacgtatgccgaggcccagaagcgaatcgacgacaagtgcgtaccctgatgccagggtccggacttccttgtccccgttgcgaggcttgctcgctgacgtgcgactcttctggcgcaggtcgctcgacgacccgatcacgatcggcatccgcctgctgaacaagcttgccaagaagcttcgcgcggcccggatgaaggctggcgcgctcaacctggcctcgcccgaagtcaagagtacgtgcagcgctcgaccaaggtcagcgccgcagactcatcagactgactgtgcccgctcaccctcgccgcagtcaacctccagagccccgagtcgtcggatccgatcgacgtcgagcagaaggagatgctcgagaccaacagcctcgtcgaggagttcatgctgctcgccaactgctcagtcgccgccaagatccaggagacattccctcagacggccgtcctcaggcggcacggcgagccgccaaagaccaactttgagaacctcgacgacctgctgttcaagacgaagggcatgcacctcgacgcctcgagctcgggcgcgctcgcccgctcgctcgacacgtgcgtcgacccgcaagagctggcgttcaacacgctcgtccggatcctcgcgacgcgctgcatgctctcggccgagtacttctgctcgggcagcgtctcgcgcgacgccttcctccattacggcctggccgccccgatctacactcgtgggtctccccttttatgcggtactcgcgtccaagcgagcgactaacttctgctcgtacaaccctctttgcagacttcacttccccgatccgacgctacgccgacgtccttgcccaccggcagctctcggccgccatcggctacacggccctccacagctcgctctcaaacaagtcgcacgtcgagcgcatcatgaccaatgtcaacaagcggcaccggctcgcccagcaggctggccgggcgagcgtcgagttctacgttgggctcgcgctcaagggccggagccagaaggagggtaagacggtcgaggtccgcgaggaggcgtttgttatccgctgcttcaagaatggtgtcgccgtctacgttcacaagtcggtcctgcctttcacgctgtcgcgctgccggaagtctgctgactcctccatcggctctgctcttgcagactcggcatcgaaggcctcgtcacgtttgataaggacctccacacgtttgaacccgagagcttcagcatcaccctgcccgcttcggccgcttcgccagacgctccctcgcgcaagccgatcaagctcgccgtctttgacaaggtgatggtcaacgtctcggtcgtcaaggacaagaacacgcagcggagcaaggttgcgatggcgctcgtctcgcccgtcctgtccaaggatctctgagtgaggcaactcttggatgttgtctcttgcactgcctgtcccgcgaacacaatcgacttgagcccatcgcgcgagcgggtccaagtctcattcgtctacgtcacacaaccccggatgctctcagagcagcacagcaacccctgcggcgaccagagcgagcaccgccgctcccttggccgccgggcctccgacgacagcctggccggccgagtcagcggtgacagtcgttccgatgatgcccgtcgcgttcgatacggacgcggccgagtaaggcagcttgagccggctctggtcgcatgccggcccgtccgagggcgggacggagatgtaagacgaggagagaccaccggcagaaaggttcccgttgtgggctgcctcctggtagaggacagtgaaggtcgtgttgacagggacgtccacagtccatacgaaggagtcattttggccgatgttagatccagcgacctcgatctatgcgggccaggaacatcaggaggtcaggggacgaggcgagcgacatggttagggctcagatgcgactgacgagcgtgcatttcgaattctgacacggagagctgtaaatgaagaggttccagggccctttggataggcctcgataactctgaaggagggaacgaacgagcgatcggatgatggtcagccgagtgcgacgcgtgcgcgctgtagcaaggacaggttaggccgcgtacaaattcgcgctcccggcagtactcgagccactggtaggtttggtttccttaaagcgagggatgagatggggccgtcagcctcaaggccgagccagagccacttgcagcggagctgggacgactgctccgccaggacggtggctcagcaggtgtgacggccgacgcaccgaagccgggctcctggacgatggacaagccgttagacgtagacggagcgttgcttgcctgctggggcagggtgctggccgaggcagtcgtcgagccgtgaagcagcgttgcggcagagagaaggaggaggcggagggagaccatcgcgcgtagaggaggtagggaggatcgagctggaagggggggggggtgaggtggtcagcagcaagaaggtccctccgcttaacctcctgcttatcaggaccttcctccggcaagctcgcttgccccggatcagctcgaccttgctcggtgcgcgggtcgtgctgcgaaggggaggttaggcacggagggcgatcgacttggttccacgcgagggcggaaagccgacgacttgcgacgacttggcgacgacgacgggaccgaaccttttcatccgagatcttctcgaaagtggtcacaacaggacatggacagacacgagtggtggagatgcaagccggatagtcgagggaagggaggagggcgagcacaagcacaagggtgcagactgagcggagtgtgcgatggaagaacggcgtcgaggcgggttgcgacggagccgagcgagagatgcgaggggatcaagagatgctgctgtcgatgcgatgagcaagcgagcggtattaagagtgactatagagagagagagagagacagcggctggcgaggacggggactaccactcgaggccgacgaggccctcctggccttgcggcgtcagctcgaggtcgcgcatcgcccggagatgccagctgtcgaaggggacgaagaaaggtcagcagggaagcgagccgcaacgcccaggcaggggtctcgaagaagagaggaacgcacccgtccgtccctccgactgcaacccggccaccgatgatgccgtcccggatcgcaccggcgccgccctggccctggccgtggctcgccaaactgccgtcgctctctgcccgcttgagcggactcttggccgtgctgatgccagcaggcgcgtgtgtaaacgagtcgccacctcccgtcaagggatcgcctccgccctgagccgcactcgtcagcggctttgagaagttgcgcgagccgctcgtcgagatgcgcgccggcggtgggccggccggcaaaggcgggagcgcgccgccgggtgggggcaacggcgggaccgagaaggctgctgttgatgccggtgctggcgtcgacgacgacgaagtctcggccgtcggctcggggaaagctgtcggcgggagcaagacgggcaccggatccgaaatggccaggtgcttgacgccgtaatgcgggccgagctggtccgtcacctgaagggggaggaggataaaggcgtcagcgagcggtcagccgacagaaggggtccagtctggtgcgcggaactgacctcgcgcgcaaactcctttgcgccccgacccttgatgagcatcgtctgcgcgctcgaaaagagcgggaacggcgtaaacgtgaacggcgccggcggcttgtcggtgacgctgaacggcctgatggcggccgagcggttgttttggccgccgttcatctctggcgaggcgggctgcttctcgcggaacatcggcccgccgtcgtcgaccatgatcgagggtaggaccgcctcgaggacgatcatctgggccggctcggtcgagccgtcgaggctcgatgggaccgtcaggatctcgggcgagagtcgcgcaatgtcgttgatgtcgggccagggcccaaccatcgcctggccgagcgcctcgaccgcgatcgagagggcaatctggaagtcgagcagcggcgtcgactcttcatcgtcgtcgtcaaaatcgtcttccgagtcggaccacttcgtgccagagtgctgggacgagagcgaccggcgccggcggggcgagacgggctttgagatctcttcgtcgcactggtagaggacttcggagatggtcatgcccgagatggtccggagccagttgcgcgcctcggggatgacggggcaggctacgtcgggcaggcggtaggccgggatctgacgagtgccagagaaggggaaaagcagtcagcaaggagacgacagattgaggagcgggcatgcgcgacgcacctggtgctttgcaaagccgtacgtgagcacctcgacgcccttgtcgccgccgtcgacctctgcgccggcccggacgccgaacaagccgacgtacgcgcccgccggctgaacgacgggcctcgtcccgcgcttcgcaaacgtcttgcagctcgcgagaaacgtctcgaggtcgagctttgggacgccgatccgtgcggaaaagacgtgcgagaagtgtttgatctcggccagccggtagccgtgggccatgtaggcgtcgagcgtcgtcgggtcgagctcgcggacgacgaccatcatcaagccctcgttgtcggccgcgccggtcgtgaacgcctgctgggccgcctgggcgaggttggcctcaacgtcctcggccccagcattggcctggccgccgtccttctcgctccgctcctttgtcccgccggtgatgccaccgaggccgagcgtgcccgtcacgagcaccttgtcaaacaggacgccgacgtcctcgagccgtatgttggtttcgccgctgagctcgaatgccgcctcgacgaagcgcgagcggaagagggcgagctccttagccttcttgtggttggcccgggccgtcgccgcccgcgagccgttgcggccgtagaaagccgtcgggttcgaagccgacgtcgaaaagcccttcttgccgctccgccgggcggcgatcgcggcggcgatctgcgtgtggaacgggacgagaatcgaccagttgaacgagagggagaagagccactggaacgtcggcttgtgcgggttgagctccgagatgatgtcctgcgagaggcggaagacagagtcagtcctgatgctctggttatcgctcagagaaggcagctcgcgccgcaccttgagcaccgcgtccgtctcgatgacgacgagcggcaacgtcccgtccatcttgacgagcatccggcccatcttgtcaaacgcagccgaggcgaggacaatctgccgtgcgtcggtcgagactttgcgggcgttgaaaaagtcgtaggcggcgaggccgagcgaggcgaggatgatgacgaggcacatgacggtgatggctgcgggcgcgaggcaggacggaggacgggtcagcaccagtcggccaaagggagagtggcgggatggagcgagagggcgagaacacgcaccgatcgtcagccggacgctctgcgcctttccgtcgtcgatccgccgccagtcggcgccctccttgaacctccacctcgtcccggcgagcgcgatataatgcataccgcagacggcggccgcgagcaggaccgcacagccgcagcgcttcgggaacgagtcttgccagagcgagcggtacttgaagaagacggagagggcggcggtcgcggcgatgcaagcttcgaggatcgaaatgacgacggtgtaggcccggtagtcgatgtcgaacaggggcatcttgaacgaggcagagtactggcagcccgtgcgaaggagacggcgtcagcgcttgttgctcgcaagaccaagagagagacaagggaagtggggggaccgacgtgcatgagcgcgatcgtccctccaacgaggacgcctgcgatcccgctccgccagagctcaaactcgccctgaccgccgcagaagatgaaggcgatgcagaaggcgacgagcgggacaaagagcgagaggacggtaaagccggccgagaattggatgtaccacgactggtcgggcgagggctggaggcggaggccgagcatcgacacctgcgggagcggatggaatcggtgtcagtctaccaggcttcgaggacgacgctcgaagcagggagggtgaagctcgaagcgcggcctctccctgcttctcacggtcggatccgccctgcgagcggccgctcgaggaggtcaccgccaagcaaaagggacccacaaagtgcatcgaccagacggcgacgacggtaaacgcgcccgcgccgaggacgagcagcaagccgttcccgaatcccctgtttgacgtccgccggccgaggatgaggagcgtcgcgtagctgccgaggacggagacgaggatcgaggcgactgtcacgcccgggttggccgtccagggcatccagcgggtcgaccagtaggccgagagcgcctcattgtctgtgtcgcattgcgcgaaggggcgaagatggaggacggatggaggacggagagtttcgacgaggccggaagggggagaacgaggacgagggacggtgacgatcgcgagccaggcaaggaggtcagcagccgcagctcgtcgtccaacgtcggatcggagggccgacaagacggaccattgtagatcgagaccggcacgcccgacatgctgtcttgtcgttcggaggagggtcaagggcgagaggtggcctggagggccggggcttggagggagggcgaaggagaggcgttcgtcccggagaggcgggctcggaaatgtcttgggctcggaaacgaacggcgggcgagtgaggcgcgcgcgagcgcgaggcggcgagaggcaagcgagcgaggtggcgctcgggtcgggctctggacaaaggggtgtcgcgcgctgaagctggaagctgctgctgtacgtgcgacgagggccgatcgctaagtgggagggagggaggatgctggggttgagggagaagggcacggcagagcagcaggcatcggaggcggcgaaggcggcgagggcccaggcccacgagagtcttccgcagtcggcggcgagaaggagcgcccgccctagctcagcgacgatagcagcaatgctgccagcattcgcacgctcagcagcaagtgagacggctcatgctcgcctcgccctgtccttagcgagcaaggtgctgcgagaggcgaggtcggtgggaagggacggctgtatgcctctacttcttcggctcgacctgctggcttgacggccgccgccttgagcccaatgacgacgacacatcgacggccgacttggtgcagaacgacaggcagcacgacagcctccttgccttcaagaagctaagacggatccagcctgccctttataagccggtcgagcgagggcgagtcgatcagcagcacgaggggtctccatggtcaccgcccggcccggccgagcggttccctgcttgctccccgctcgagtctcagcacgggccgaaccgtcgtccccttctccgccgccccgaccgactcgaccttcccagcgagcgagcagacctctgcctccggtcggtcgctgtggtccagatgcccgctcgtctgcgggatccccctcctcccctttcgtgctcgctccgcctttggaaggagagcaagacgagaaggggatggctgacctccgtcgctcaccttctacccttctgtccctccgtctcttgctgtcgcctctcgctcggccttctacctgcacgacgccctccggctcctagcggtacgctcttgatcttcgccggcacgccgctcgcgctctcggcagcgtcttctctcccgcagctcgctccctcgtgcccaacctgccgatcggccgcctctctctcccttccgaacgacaggcgccagaaggcatcatgtcctccctgatggccatcgtgccctcgcaacaccagaccgagccaaaatcgcccatgtcagccgcagcaccggtcccaggcgtccctgatgagcgcggaacggccgtctacatcgtccgccagccctcctcgccgttcacctcctcctccctctcctcgtcctcctcctgctcgttcgactatcccgccccaacgccgatcatcgccaacctctcccggcccaaaagcaagtcctccagcacgagcacaagctcgagcggctcgagcagctcgttcaaccgccactcgccgctcgcgatccagcaaacgtttgaccggctcgcgctcgaggccgcccagcacggcgcggcgcgggccggccggcggaggagggtcggctggcgggtcgtcgcttggcttgttgggctcgcgctagaggggtggatcgggttctgtaccgtgcggtacctcgtggcgttcattcgtgcgtcccctctctccccaatgacgctccattctgctcagactgacccgaaggccctcatgcgcccccggcagtgctcgagccgtcggtcttgaggacgctcaacgtcaccttcttcatcacctcgctcctcgctctcgtcctcctccctttcgtcctcctcctcccctcgggcgcgcgaccccggccgactactgccggcggcggcggcggcggcggcggcgcccacccgctccagctcggagcagggcgacctccttcggtcagcctcggcttcacggccaagccctcggcggcgagccggagcgtgataagcagcctcttcgcctacctcgccctgaccgcctcgacgctcctcacgctcctcactgccggctcccagctcgccatctacaaagcctgggcggccgtccctgcacctggtggggggtttgctcacagatgcggctgggatatggacgcgtgctgggggagagggggcgagagctgcgaggggtggaggtgggacgggtgggtcggtgtgctgagtgcgagactggccggaagcgcagtcctctttgttcgccctctccgtgctcctgttctttggcctcgggccgcgctcatcctgatccttacttgtgcccctcaacccaatctacaggccctccttgcgctcgcccacatccaagccaaccgctcctgggccgtcccccctaccaccagcatcccatccgcgcacccccaccaaacgtcatctatcatcctcaacgccccccgcccagtagcactcaacccggcagaccggcaccgctcgaccgtcacgatccgctcggcccagtcgtcgacgctcgccgcgtccgcagcggcgtttgtcccaccgtcgcatgagccaaaggcgacccctcctccgggaaccgactgcttcagccgttctcgatcgcacccaatgccggtgggcgagaaggacggtcgagtgcccttcccttcctcgttcccgccaacgactgccgtcgaagagcgagacgcagcagcctccgagctcgccgcgcacaaggcgctcgagcgcgcgcgcgcacttgcaaacctcgtccgcgtccggccggggcctcaggctcagcctgtgcctgtgcctttgctgtcgcctcggcccagaggcgcggtgggagggacgaccggggcgcgatacctccggtcgacattgcctgcccagcagcagcagcagcagcagtcgccttcgcctttgtggaagggcaagcgtcagccggtcgccaacccgccgccggccatcgctatcggtctctctgcctcgcctcttccggtcgccgccgccgcggacaacgccagcaagccactccctctcgtaccctcgtcgacgtcgttcaccttgagccactatgccccctccggccgctccacctccaactcatcagccaacggaccccacggcccaccttcgtctagcgcgagcccgaccaagggcgagcgcgagccgagacgccgctggtcggcgaccgacgtcatgaagcgcaaggctgtgccgacgttcttgacgctcgagctcgaggcggacgaggccgcgacgatctctgctgaggccggcgagtcgatgccgaagcggccatcgtctgcctcagcgacgtatgcgctcagcccggtcatcgaccggccagcaacagtccctcccacggcagccgccaccgccgctggcacagggtccgactcaagctcgcctttctccttgccgtcctcgtccgagcacgtcgactccgccctggacgagtcggccgacgtcctcccctccccgccgccacagccgagaccgcggcacgcctcgacgccgccgtcgaagctggtcgacagccggctcagcacgctctggtccgggagcgaagggagcagctcgcggctgagcgaccgaaggccgagcgattggtcgaccggcggcgggagcgcgggcggtggtactgggggaggagggggaggcgagcgaaggtcgagcttgtggtctgcgcagggttgagacgctgtcgttaagggtcctctccccgaagaggtgttgtagtcctgtctcatgagcctttgatgtacaactgcagacggtcaggcagcgcagcgtcagcgagcgagcgaacctgcgccctgcaagaggaggtgatttcgaataaatggctaagccagccagtgatgacgatgtagattcaccgtcatctatcatcccgtctgcgctagtctgagagagggtctgcgctcgtcggaaaaggggcggagggaggtactactggtcggcgggtgggaccgcgagacaatcgacgcacgcgacgaccgatcgacgaccgtcgacttttgctctcgaccagctcgtcttcgcctctcgaagttcagcgcgtgtcacagatcagggccaggcaggggcgtcaggcgtatgtttcagcggcgagtcgaccgggctgatcatatcccagacctcgagcggcagacactcaaaggtaaggctgaacgggagctccttccagtcggctgactgtagggcgagaaagaggtcagggacgccgtctgatctgatcgaagagctgtcaagggatgcgtagcctgcccttcatcagcttgctcggcttgcttgccttcttgtccggacgctccgcctcctcgtccaacgacggctcgtccatcgccactgccttgcctttcaccttcggatctgccagcttgaagcctgaaccactggaccgccgagcgcttctttgaagctgtacaacgaagagcgcaagaagctagatgtcagcacttgccgaggggcgcacctagacggctgctagacgcaacggcagcaggcggctgcatcgcagctggaccggccgcagtcgacggcgaagaggcggccgtatgggcagcaccggtcaaaatccggggtttagcggcgcatgttgggcagttcgcgtagctggagggagtgagggttgacggggaagacgaggcgacaggagtcggctcgaggcagactgcctgctgcgcgaagctcgacaggacgacgagctcgccgctccggccgtcgaggagagactctactctcaaccaccatctcgccccatcgcatccagctcagctgcgggcatgtcctcttcgtcgacgacaccacttgggacagcgaccgccttccgaaacttgacgtggtcgggctcggttccgctcaagatctcgctcgcggccgacgcgccggccggcgcaggcgagagctgcttcgtatgttcctttgcaactcgaccgcctctttgtcggccctgctcggatgacgagacgatcgctgacagtccttgcgttggctgtatgtagttacaggcttcacgcaacggctacctctcgcagtacctgcaggacgtgcgcgagggcctcgtcgagctcgcgctctcggaggagcagctcgccgcgagccgaccaagcgactggtggttcgaggacgtctcgggtggcggtcgggccaggtggtacgtatctttcgatccatcctctagtaggatggaacactgacgtcgttccgtggctgatcgcaggcactggtcgataggcctcatctatgatcactcgagcatcaacaacccgaacctgtcgacctcgctgccaccgacgaacccgtacgtctggcccgctagcgtcgcatccggcctcgaccgcccatcacgagagcgtcatgctgatggaactccttgtcgtgcctgattctagcccaccgctgcagctcgtcctgcacctgcagccacaagaccgaccgacgctcggcctcgtaacgtccaactcgctcgaggcgtgccgaatcgcctacatgagtgcgctcaaggagggcgatttcgtccgctggggcaacacaaagcgcgtcaacggcctcaagcggaccgaccaggacgcgctctggacgagtctcctctgtagtgcgtactctcgcgcgcatcgtagcatcctcgcgcactaacgatctctcccgcccgcagatgacttcgagacgcaccaccgcgtactgtcgaagctccttccgctcccgaaccttccaccaccaacgccggtcgagagctcgagctttaccacgggttcgcgaccgccaagtgtcgagccgggccagcagggccactcgagcattggcgtctcgagcggcaagcttgactcagcctatgctgtccgctcggtgccgatgaaggtcatcttgcccgaaggcgcgggcgtcgtccaggaggtcttccctccgctctcgacgacaggtgcgtcagcgactgctttatcgtcgctcgcttccacgatcgtcgggctgacagacgtactgcctcgcgcaaacacaggcgaaccgacgacgctgcttgcgacgctccagctgcacttgccgcaacttttccctgcctccgagggctactcaatcgccttcccgctcgtccaaggcgtcgtaccaccgtcagaaacagaggtcgcctggctcggggcgtgctttgccggtgcagacggttgggttggcgtctgcatctgcttgagatgacgatcatgtcgcttcaagatggtgcaggcgggcttacaaggaacagtgaacggcgggcagcgggtccctgcaatgacccagtctccgaactaggacaaggtctgcgggttcagaagcggcgtgcagagaggggaggacagcgtgcaatgtgcacagcacccgaactcgactcgatcaccaggagacggccttcgggagacgaagacaagctgattggatacaaagggcgcagacgcatctctctcagcgtcgattgtctcgcggtcccacccgccgaccagtagtacctccctccgtcccttttccgacgagcgcagaccctctctcagactagcgcagacgggatgatagatgacggtgaatctacatcgtcatcactggctggcttagccaagtggttacggcggttgattcgaaatcacctcctcttgtagggcgcaggttcgaatcctgcagccagctcgttctttttgctaccgagattcccatctcgttttctcacctcgctcgcttttgcgggacagtcaaggagccgcaattgccgacaggatgacaagcagatcaccagcaggatctaatcacaagacagaccaatattagatgcgtttcgtgacgcgctgtcgcccctcagtagatcattagctgttgatagccaccctgtccatccgaccattgacagtgcgtctggccgacagtcgcattcccaacccaggccggaagatggtcgctcacgtcagcccgtgcgctcctcagcgcatagaaaaattgtcctccgcgctcgccatccctccctccccccccccctttcacaggccctccctccctctctcagcatcacgcccgcccctctcccttccgccaggccagcgggccgacaatgtccaagacagcgaccgccaaagcgcgcgatccgttcgcgctcaagttcaaaggctccaacaaggcttttgcgccctttgccgcggttggcgaaggcccggccgtcgcacagctctggctgtgcgccgcgcccgtcgcatcgcacctcgaggccggcgagagggttgccaacctcgcctggcggctctgggcaatccacgagcggacggtcgtcgatgagagtgcgcggcatcggaggagctttaagcggctcgcaaagggcgtcagcgagcggctcgaccgtgatcgcgctcggccggtccatgagctcagcctgcccgagctcgcacccgtcctcgacaatggtgacgtgcgttcctcctgtctccccgggtggcttggaagcgcactcttgcctctccgccggtgaattcgccgagagtcagggcttgggtgactgacctatctcgtcctgacccccattggcgcccatgcaggacgcgactgagcgactcacccggcgcgttgacttcaaggccaacactcgccggcgggcccagctcgcacgcgggaccggcgcccagtcgatgatgcacaccttcgcgctcgatccgacggtcggcctcgacccgacagcttcatcgtcgacgtcgacggccgccgccagccgacgaggatcaaacgtctcgagcgccgccggcgtcggtcggccggccttgagctcatctgagcagggcagtggtgggagttttggcggtcgatcgtcgaccggcttgggatcctttgcgaacgacgtcgaaatggctggctcgggcggtctcaacttgacgtaccctacgcatgggcctgtcgacggccagcagcgtgcgggagcgcagggactccagcgggctccatcaatcccttcttcacttcgcatgacacccaactcgtctcgccggtcgtcttttgcccggccagccatgcagcagcaggcgcagcagcagcagcagcaggtcatcaacgacgaggccaacctgccaccgccgtacccgtcgaaccacccatttgcgcgcggccaccctggaccggcagctgacgttctcggcggcagtcatctgtttcagcccgctggcctatcgactggccaggccaacttgagcctcgcgggccagcagaacttccagagcaacctcgacccgcaacagcaacagcaggcggtcgctgacacgctcaaccacctctggggtcagctcggcaccggagcaagcaatgcgtccctcggcgacttttctggcttgggaggagcgagctccttcgaaacgctggatccgcagcagcagcaggtcctggtcgggacgacgccggcgtcctcgtcagacgcctcatcgcccgaccacaacttttcgcccgctgccacggccggtgcctccggcttccactttgcccagcgcgtgacggggatccagggtcaacagcaggccagctcgataacgccgaccaacggcggagggtcgggcacgcctctcggccctcaccgtcgctcgagcaacagcgatggaatgggcctccatggagccgtacgtcccttgagctcagtattcgactcgagagtgcttgagctgacctcttccttgcatcgatgacagccctatcgccggccatcgctctcgcagcagtcgtccgctttgccttctggcgctggttcgcccgcaggcgtcagtcgccgtacggtcctcgctccagtcgtccgccagcgggtcagagggctgacgtcgttgcttctctctccctccctcgtcaggcgcctcctttgcccagcgccggcgtgagtcgacgaatgcggttcccagtggcacgatcacgcctgccgacggctcggcgctgaacctcggtctttcgacggccagcggcgcaggctggatgacgccgaccggcgaccttgcagccggcctgtttggcgtcgagcttgcgagcccactcgatgagcctgctggcccgcggctactgagacaaagtagcacgctggcggcgacctcgccccagccactcaaacaccgaaccttttcgagcggcagcggtggcggcggcctgtacgctcgctcaggcctcttgtcaagcttgacaccgaccaacgggtcgcagatgacgtcgacgcccgtgtttttcgacgacgtgccgatggaggacgccgccggcagacagcacgatcgcccaaaccggcggatgtcagactcgaacgtcgctggccgggcggccagcagtcactcgctccgcgatcagctccgcgagatgcagctccagcaccagtcttatcaacaggcggccggctacgcctcgacgctcgagtcgtacgtgcccccgccggcggcgacatccagcacgacggcgggattccacacccgctcgtcgccgccctccaatggcaacgaagccgtcttccctgccctcggcggcggcggtcatctgccttctgctgcttccctcttcgacgtcaacgcccacccggcgccaaatgccagcctcgggcccagcccgcgcggctttaccccggcggcaggaagcctcggcgattctgcgctgttctccttcgcgcctcagaccagcctcgacgacatcttcaacgatcttctcggcggcggcggtggcggctcgacgctcaactcggtcactgaagccgagcacgattcatgagcgtcgtctgctcttcgcctcctccgcatctcctcgtacagcaaacctccttgcccccgctcggaaacgcccctttgtatcgcctagccaaccctgtatcaatcgacgccttgacacgccgccgctcgaccaaatcgcaccgttcgcgaaaaggtattgatagaaaggtggggtcggctattcggcctcgcaagagaggcagtcgtaatagctgccgaaatggccaaaacgctcgcgtttccagctgtcgtcgcccgagctgccggcctcgatctcagctcgccaggcggcgtcctcaccaaacgtctcggggaaggcagcgccgaggccgtttgcgatccgttcggcgcccgctcgcgagccaatgaggttggcggcgcccggtccgagctgaaggcctgcgtagccgccggcgacaaagaaggggacatcctcgcgccactggaggtcctcggtgatgagaggcatgccgccgcaggaacgaatcggaacgtctttgtgaaggcccttgaggaatgggaggccctcgatgtcaaagagcgagcccgttgccgtcctggacgagagagagaggttctcgtggtcagcgcgtgcaacgatcggccgctcccgtcagagcagactcacacaatgtagtcggcctcgagaacgtccttctgaatgtcaatctcggagtgcgggcacgcggcgcagtcgtcgctttcgtcggcctcgtctgaagactcgctgccacccttgcggccgcgcttgggctggcgttgcttgcgcgacacccgaggaatcttcttctcgcaccgacgctcgacgtcgatcgaccagcggccagtcgtctcgttgcgcttgtgagccgtgagcgacgtcagcgtccgcagttcgagtgctccagatgcgatgtggcttttgaggacgcggtggtaaggtgcggtgatgctgccgccgccgcgagcctggcggaattggatgaggcgggcctcggggtcctcctcctgcgataaacagctttgcggtcagcccgatcggccttcaggcggagaggagagatccactgaactcgcctggtagaagacgtgctgcatcaagttgccaaagcggccgacccactcgatgccaatgtcgaacggcttgactgtgagggatgcgaatgttgattagcatggcgcgctcaaccccgccaagatagacaggtcactcactcttcaggtgggagcggcagacgaggatcaccctgaagccctttttgatggcgaggtcggcaatttgggcgctcgttaggccaccaccgatgacgacgactgttcctgagccgtctgtcatccgctgctggagcgcaaactcatgcttgggcgggaaagtgaagcccggccggaggaaggctgccgtatggcaccaaccagggccgtcgacgaccgtccgggctgcgggatcgcgcagggtggccgggacgttcggaatcccaccaggtccgatggccatgacgactgcgcgcgagtagaagacgcgaccgtcggccgtcttgatgacaaagtggggctcatcgaaagcagccggctccacgtcggctttgagagatgctgaagaggtaagaacgccgggtgctgccgtcgggtcgagccattggatggacgaaacgacgccgtgctgaacgacatcttcgagtgagaagcgctcgacaacctcctcccggataaagtcggcaaaaagcgaggtcgagggcgtgtgatagtcgctaacgtctctcagattgacatgtggctggcgcatcacggtgccacggacacgagcgctgtcaaggggagggtgaagttcagcctgccggccagctcaggggcgaaagaaagcaaatcccgcacctcttcttttggtgcttggaccactcgcgtccaacgacaccgccgatctcgatgagctcgtcggtccggccgtggctgtcggcgtacgacttgagggcgttgaggtcgcctggatgcggatggaagaacatcgggctgcgcagggacgagatgccaaaggcgttctgcagaaccgttgggacgagcgggccctgtcagtcgaagatccacacaaaaagaaggacatacgcacgaagagcgtatcccaggtgccgagccagccggcgcgctgcttgtccatcacgacgacacgcgggcccttgtcaagctggaaacgacctttggcgacgggtcccttggccggctgagcgcggccctcctcgacctcgcgcgacaccgtcttgttgctgcggtgcttgcggatccagtggaggcgagcatgctcaacttccgagtagagggcattcggtgttggctcgtaaagtcgggagatggtggcgagggctgcgagggttatcagctcgggttccgaaagaaaagggtcgtcaggcgaggacccaccatgcgggccgcctcctacgacgaagagatccaacagctctggatcctcatccggtgcaggtgacatgacggtgatgagctcagcggcaggggagaggggaggagacagaggagggagggagaagggcgagggaggcaagagagcgagagcaggcgggctggatggtggttagcgggcagtcagcaggcgagggggcaagcagaagtctgcgatggcgagagacgaggcgaggccagtcatgagagcgttagtcggcgagggtctgctgcgtgaggggacgcagggcagtcgtgaggaccggatcttggccccggtcaaggtcggtcatcgccggcaatgcgtgactggaggtcggcaacgaagagcgcgggtcgagaagccccttttgacaaccctggcgagcgagggtgcgtagaaatacagttgtccagcgatacagggtgggacgacgtgcaagtctgagagggccaaacctaggcgtctgcggtttcccaggactccttgccgggccagcggcggatgccccagtcgcgcagctggtcgacgatctcggcccgctgctgctctggcaagctggccgggatactaaggcagcgagagacggtcagcggagcagtcggtttcgttttacgcgatcgactcactcgtcgttgagcgcgagtagggcgacgtctgggtggcggtcgagataacgatccagctgcagcaggctcgaagtccctcgcaagctggtaaagtgcgagggtgttgatccgagcgtgtagcgatagcggcctagcaaggcgaccgtccagtcgaccagatcgatgccggtgctcggcataccgctccaagcgggcaggagggcggcgagtgtaaagttggcctcctgccaagtcggcgtcagcggaaggtgcgggatgtcatagatgtgaggtcgcccggccggcgagtcggcagagagagatggccggaagaccgtgccggggcgaggtaggacagccgtgaggcctggctcggctgacttgtcgaggacggccgtgattactacgggattctgctgtcagcagtcggcggcggcggaggacacgagacagacacgcacagaggccgccgcattggctcatgaggttctcgaaggcgagtcgaacaaacatggtcgccgaatccacctcggcatcgtcatcggccgtccaccatgggcccaagcagaggctcaggtcgagctttgcgcctgatcctgcgtagaagggattgcgcggtaggccagaggcagatgctagatgggtaccgtcagctcgagaggggcttcgactgggactggctgctcggacgtactgaagccgtagtccgtcgcgagaggcgttgcgtccccactggccgacaccgcttgccggatcgccgccgccgaccatccatgccgatgctcgccgaccttgccccgccagccgtcgacgtcgagtgcccgaagctccttcttctcgcgacggccccagacggagccggcggctgtagcgggccgagcgacgatgaacgaaaagaggagggcctctcggaagcgctggcgaatgtagtgcgtcgccaggaaggcaatttcaatctggaggtgaagagactcaggtcagtccagaacgtcgctcgtctaagattgacgcacgtctggcccatgtgttttttgctcgcggaagcgtcggagagacgcctctttcagcgcgtccttataggtgatcgaaagctcgtgcaggtgagcctgcgtgagcgtcttgggcaggctgcgggagggacgagagaagagtcagagcggtcttggcggtcgacgcgacgccacaggccgcactggttgagatattcgaggccggtactcggatgccggtgattcaggatccaagccgaccagtcgagagcgccatgctcgccgctgtcgccgactctggcgttggccttgcctgtcacctgcaaggtgggcggtcagtcatcgactcgaggtcggagctcggaccgcgcaccttcagatcgtcttgcagcttgaagacgggaccaaagagggccgtatggaagtcggccgacgagagcggtctgaggatcatgaaatcgtcgttcatcctagggaaaggaagcgagtcagcggagtcagcgctgcaggcactagcaggagtggagcgccgggaccgacgagacgaaggtcggcgacagatcagggacgtttgtgagctgagactcgatggcgaagctggaaggaggaaagctgcatcagctaccgctctctcagagtcgtgtcgaaacacatacgagttgaatgtcggcagcgcttccgccttccacgctgtctcgccgcaaaagacctcggaatgaaacgaccatgaaagttgtcggcgaccgggagcagcctccgcgtcagcagaatgcgatgcgccgttttcggcagcggcacaggccctgtcgtcacgctctgccgatgcccagggccggtcgacgaggttccagtcgagccagcgagggatctggcctctgtaggaggggaggacgtcagtcttgcctctctctgctcagtcacaggggagcgctcgacccacaagcgaacggtgtcatccaccgggtctgggtagtcggaaccaactccgcggatcgcgccagccttgagtcgacaaccaaggaggttgcgggcgatcgaccggagcgagaagcgcagttcgcccatatccgagtgatggcggcgagcgggccggacagcgccgccgtctctgttgacagcagcgagcgcgacgtcgtaagccgtgaggaagagatcgccggttccattgacaaagagcacggccgtgtcgaccggttcgagcgtgctcgtcaggtcgcacagcgctgggtcaaagtcggccggctcggccagcgtgaaaaggtgctggagacaagacgtcggcggcgcagggtacgagaccggctcggtcggcgggggtgacgggctggccgacagactgaagcgcgggtggtcgcacgaccagcagtcagccgagggcgcagggacgacgtcgctcgagctcatcgccttcggcgctctcgtcaaagcaggtgcttcggctgtttcgccgagagttaggccgctcagctggggcaggtccgggtcgaccgacggccgtgccttgcgtcgcaagctgccgaggcctgccagaagcaggcacaacgtcggcagaaggaggatgagggcatacaagcgccgcctagatgtcttcgaccgcctgcgtaccctctgacccggcaagagcgatgcttcctgatcagtcgcagggagcaattcgaaggcgttgagcttgccgagcgaagcgagagcggcctggaccttggcgacggcagtgacacgacgtcgactcccaaagtcagcggtgttggtcgccctcgtctggctgctgttcgtgcgcaagtcgtccgagctcgtggacgagggcagggccatttctgcagcaggcttgtcgagcccggctcgaggcaacaaagtgctgagatgggggcgacggttggaggtgttgggggctgagctgttcgagctgcttgcacgagcttccgcctcgtcgcgagatggcttcagacggccacccgccttgacattctcgaaccaccctctcatccagctgctccaggtgagagacttgccgtgtgtgctcgcgcacaggtggcgactgcggtgctgatgggcttgtgcctactgcgatgtccagccctcctccgcccgctagctcagcccggccgcaacgcaacccgctcgctgtcgcccctcctcccgaccatggttgccacccagagaccgcccgcgtccgtcgtccggtcgccctgggagcggattccagatttaccacttgacatccagcggcttatcctgctcaaggcgctcgagcagccggtgcgtctcttccccggcatgcgagctccggtcgttaccggctctgctgcttaccccttctctctctttaccatctggcagagctactactgcccgaaagacaactcgcgcaaccaccgcgagaactcacgcctgcttgcccgtgcctcactcgtgtgcctcgagtggcaggccttctgctacccgatcctctacgcgaccgtcagtctcccgcgggccgtgcacctcgaccggttcgcccggacgctcgacgagcagcccgacctcggcctctcgaccgtctattttcactactttggccaggtcctgccggccgaatttatgcgccgcgtcttctaccggatgcctcggctcaagcaccttctcacccaggccgacgtaacgcagattgaggacgccgacctcgacccgacgcgcccccggccgaagcttctcacgctcgaggtcaggacggatttaagcattccgtggcgtttccctgacactggaaggcccgctccggccggtcgacgttggctgacaccctcgcctcctccttgcaggtcgacccgggccttcacgacggccacggtcagtacgtcgatgccggcgtcacgcgctgggccgacctgagcgagctccagtcgctcgcgctcgtcggcgtcgaggcgccaaacaatgtcctgcgcgagccgctcgccaacctacaggagctgcacctacttcattttgaggacgacctcgacccgtcggtgcgtctggccggcggtcgctcttgtggcaggaaggtgaagcgctgaccggggccgttctcacttgggcagcccgacgcgcatcacctcatcctgtcgattctccgtaaggtcggccctcagatccggacgctccggatcgacgagtactcgagcgacattctgctcgcgccggtcgagatctttgattactgcccgaacctcctcacgctttcgatatcgggctttgacctagagccgctcctcgcgcacggccacccgaccctccagcacctgctgctcggcaacccttgggcgtaccacctgctcggccaggacgacgacgctggcttcatcgaaggcgcggccaagcacgagctcgccgacgaggaccgggcgacgctccgcaccgtcctcgatcgggccgacaagctcgccttccctcggctttgcgctatcatcctctggaacgtctcttttgacgaggcgcacaaccggcacgaccgcgagatcaagcacgtctgcgagtcgctccacaagcgctgtgcgtccgcgctgggctctgacgcttccttagacctctgctgacctcatctgtgcgcgcgggtacagtcggctggctcgttggaggtgtgtcctttcactctgatgctgacctaagacagactgcttacgtgacgatccttccctgccggcagaccgcttcgcctcgggccgcaacccgtcctgggacggcgacagcgaatttgccgcctgccaccggaccggcacgctcccgtcctaaagacggtcgtccgcgaccacctctctctcctggtttctctggttccttctttctccttctcacggctctccttccaccgtaccccatgcacctgctctggcccgctcgcgctccggatcgctcgttcgatgaccacatggcaattggccggctccgctcacttccggtcgaggcctttgcccttgggcgcgttctttagccgagggtcctcctcgggctcgtcctcgatgttgcggaacacctttggctggttcgaccacgagcctgcccagatcgggttggtctcagccgcgtcggcatacttgagcaaggcctcgcggggctggagaaggatgacgggcagaaactaggtcagttcgtgagctacccaaacggctaaaccatgttggcgcacgtcttcggcccgggtgttgtccttgatgatgtcgcggaggaggtgctgggtggcgcctgcaaaaggtggaatgggtcagggtcagcgccacaggctgacgatcgggcgaccgaaacatccccactcactcgctccgacgcggccaccgtgacctggtccgctgagcggctccttcggcttcatcgtcttgaccggatcgttgcgctctcgctcgcgcttccgcttgccggccgccgcgccgagccggttctcctcgcggaacatcggcagcgagtggggcgtgatgattacgggtgggaggctcgtgtcagcgatcgagtcgatatgaggggccgatgtctttgggagctttgacagcggcagtagcgcgccgttgagcgaggaccggggcgagtagaggatcgaaatgagtcccgaggacgagccgacggcgacctggttgattcgggcgtgccactcgagccggatgatcgactgctcaccgaccgagacgcggcgctcctcttcgagcgtcgtctttgagaagcaggcaatttggccgggcggcttttcggccatcggcaccggcttctgcgagaggcccgttaggatgtgcttgtcgtcgggcgaaaagatgatgttggtctcggggtagaagttttcgaggtgctcctgaacagcgaccggcttgcgcaggttgcgcatgtcccagactgtggggccagtggagggcaaggcgtcaaaaggcaagtcgagaacggaatcagtgacgaaacgactgacgcttgaccgtgtcatctccgccgcgtgaggcaagcgttcgtccgtcgatcgagaaggcgagcccgctcgtctcggtcccctttgcgtgcgctccctcgcacgtcgcgttcggtcgggcaaagtttgagctcgtcgaccacatgtggatcgtgccgtcgtagccggctgtaggaccgcgtgagacgtcagctattcgcgcccgcctgcagagcacgcgtttggacgcaccggccgcaaagttcttgccatctggcgcaaaggcgcacgtcgtaacccgcgtccgcgttccgcgctctttgctcttgacgacaacgaccgtcttctgcttccgcttgtgttcgacatcccagatcctgcagcaggaggcgcgaaggtcagcttgccgggctgaagaggggctgacgggtagaggtcgtcgcacctgacggtcgagtcgtttgagcacgtgatgaactcggcgcggttcttggggttccagcagccgctgttgagctcggcgacgtgtcctctgcctcgcaaagattaagatcagcaatcgaagccgtgccagagagagggagagcaagggacgcacgccgtgtgcttcatgtcgcgaatgtaagggtcgcccttcatgtactgcgttccgcgattgtcgcctggctcgccgtcgcgcgaaaagacctgggcctgcgacgtgcccgagacgatgagcatctgctcgccgtcaggcgagtacgtaatgttgtggatctaccggacgcagctcgtcgtcagcacaggaaacaggcggtcggcctgcgacgcagaggacggacgtggtagctccccgccggctcccagctcctgaaaggcttgtagccctccttaccctgaccggctgtcatgccgccaaagtcgtacatcttgacgtcgtagtcgtgcgagcccgtcgtcaagcgagcgccggcgccgtcgagcgcaagcgccgacacgggctggccgtcgggcaagggacggtcgaggataagagggaaatcagccttgggttgactctagcccaccttagacgcaaaacgatttcgctaaaggtataacgcaccttgccgtggtccttccagccgatctcatgggacgccgggagccagtcggcctcctcgtacccgtcgtccacatcgtcctcatcgtcatcgtccgaagggttgtcatcctcgtactgccttgggcgggggaagctctgctccgccatcctcgaggatccagcctcaggctgctgctgagccgagctgccggtggccgggggaccggcctgcgctgctggctgcggggtcgagctcgagctcccggcggtcgtcgatgacccattctttgacgagctctacaggtcacacgcaagagacgacgttagcagctacaggggcggcttggctgtggcagacgggcaaagcgtggcgggacgcaccggctgctccctcttggtccgctcgaggttcgcctcggtcaccgtcgacttcttcggcgcgctcttcttgccaaagccgccaaagcccatcattgcggccatatcgtcgtccatcgtgagcgcaaggttcgaggctgttatgtcgagtggaaagagagagcggcgacggatgggacgggctcggggaaggtgatggtcggcggcgtgacggcaggtgagccgacgcgttccttcgtcctgcccaacccaacctccctgcttgcacatagctcgtctcaattagatctgctcgtacatacatccccagctcagccttgagcctcagctccagcgcgcagctcgacagcgtgccatccccgacgcgcgccgtttttccttcgggccagcagcagctcaaggcgcaggcgttccgattggagcgagcggcgatgccgagggtgccggcgggccaggcgagggcactgcgcccgaaggcgagggggaagggagcagcgtcggcggcggtgggttggggaacatgcccggcggcgggatcggcatgccggggatgggcatgcctggccgccagcctggcggaggggcagggaagcctggcggaggacggaagccgccgggaggcattggcggctggcggagagacggctcgcgaggtcagtaactctatgaacggacgaaagggcaactgcggcagacgcaccatgcccatgccaggagggggcggcatacccatccccggcggcggaggcggcataccgttgaagccgccctgaggccggaacgtcggcggcggcggaggcgtcgcgcccgggaacccaccacccatgcccatcggagggtagcctccgccaccgccctggaaaccaccaggtccaccctggaagccgcccggtccgccctggaagcctccaggcccgcccaggaagccacctccgccgaagcctccttgcggcggcggcccaaagcccggcatcggcggcggagggagcgcgctcggcggcgggaggccgagcatgacggccttgtggatcgccagctgacggaggaggtcggcctctgggatggccgcgtacgagatcttggacttcttaacggcgggctcgcccgcggagccaggcaggatgccggcctcctcctccttgcgcgttctatactccttgagtacgtcggctgggaagccctccatgccgaaaatctcgacctcgtagccgtcccgaccaggcagtgtgttttcgagcctgcagcaaccagagggtagacctgtcgttagcatgactgagcagggccagcgcgcaggaagctcgcgacgcacggctccgattcgagcttgtgaacctgctgaacgtggaccgcgagacctccagcctgttgtcgattgagcaggatgctgtcagctcctgatctgcccagttccactagcacgacgacgaaccgtgttgagctttcgcggacacaagcggcacttgaagtgcttcgccttctgatgctgcatcaggactggcgcgtcgagtaggcgagtcagccccaagcgaggcagcgaagacgttagcaagcatgcgaacctttctcatcgtcgaactcgcgttctggagaatgcgagaggttcagaagggaggccatcagcaagaggagcgcgaggtcggcgacgtttgccgaggcgatccggcctcgaagcgggcgcggcccggatgaccgcccgcgacaagacaaacgcaccgcagtagtagcagacgggcttgtggacgacggtcgtcgtcttgctcttgcgcttgcggaccatcgtgagcgagagagatgatggggctgttggcgagcgtgaggatcggggcgactcttgtgctgcttcgaggcggagacgggggaatcctctgggcagtgcatcgagcccgtggtcgttgcatcgagctgtccctccacgcatgagagacggcgagacgacgacgacgacgacgacgacagctcgacttcaacctcaccctctccctcactcgcactcctcagctcttctcaccatgttcgccacccgctctgaatacggtccgtcttgctccggccgctttggccgaatgtgcagggctgacggctcgcaagatggtccgacctcgctcccctccgacagaccgcggcgtcaacaccttctcgccagaaggtgagcctccatggcaacagttggtgctacctggcagtgcagctcgctgacgtcccgctctcttcctcgccgtgtctcaggccgtctgttccagggtgcgtcgccgctcaatcggtcgtcgcgcggcaagctcgagctgaccttgtgagatggaccctccctcgcctcagtcgaatatgccatcgaggccatcaaggtatgtagctcctgatctcgcacatcgactccctggaagagccgtcgctgaccgagtgactcgttcctcagctcggctcgacgacagtcggcattcggacgccgtacggcgtcgtcctcggcgtcgagaagcgcgtttcgtccaagctgcttgagtcgtcgtcgatagagaagatcatggagatcgacgcccacattggctgtgcgatgagcggcctgacggccgacgcccggacgatggtcgaccatgcgcgggttaccagccagaaccatgcgttcacgtacgacgagccggtcggcgtcgagagctgcgcgcaggcggtgtgcgaccttgcgctccgatttggcgagagtgtcgaggaggacgaggcactgatggtgcgtgtgctggcctagggctctccgccgtcctaagctgacctgccaccgcgtacctgcagtcacggccgtttggcgtcgcgctcctcatcgccggtatcgacgagcgtggacctcagctgtgcgtcccccttgccttcactcagtcaaatgtttgtgctgaagactttcggcgactctggcagcttccacaccgacccgtctgggacgtttatgaagcacgacgcaaaggcgatcggctcagggtccgaggcggcccaggccgagctccaggaccagtataagaaggtgcgccccctactctgctcgctgctttgccggtcagcgactgacattctctcactgcttgccctctctgccaggacatgacgctcgaggaggcccacaagctcacgctcgtcatcctcaagcaggttatggaggagaagctgaacgagcacaacgttcagctcgcacaggtgcggtcgcatctcttgatatttggctcttggctgaaaggtgtcgcttgctaacgagctagttcctttcatgacctgcccaggtcaccaaggcgggcggcttccagatcctcaaggaggaggagcttaaagcgctcgtagaggccatgtgagacggcttcgacgatgatgatttgcgatgaatcctccggctgctctcttgtgtctgcgcagcctgtctggctcgtcgaaggcggtctgcattgcgaggtccttgagagtgacttgtcgtctgcataccgaaggcggaagggcttaaccggtggccggcgatctcgcgcctccgaccccccgaccaacatcctccttctcctcgccccgtctcgtcagccaacctctcctctcgcccggatgtcctttgcccagccaacaaccaccgcgtcgagctcgtccaaaccctggccctcatcgtcgtcgacgatggcaggaggaccgatagacagcctgcctcggctcggcgagcgagcgtcggcagcagcagcagcaccggctaacggctcgtcctcggtcgcccaagcctacacccgcttcctcattcacaaggcgtcgtcgatcgcgagcgcagagagcgccgtccggagcgcgacctacctcctgcccggccgatttgagggcgccgagatcgctagcgaaggaggtgagttccctcgttgcgatggcaggtaactcggcacccgggtacaactcgccgagccagatcctgctgccgcctcatcacaatctctcgagttgagcctgacaaccctttgctcgcaattgcaacagtcttctcgctgctcacgctcctccatgcgttccactcgcacctcctccactcgcacctactctcgctccctccggcactgcgccccgctctgccgccggcgaccgcccacgaccgctacacgcgctcctgggcccggcactcggtcctctaccggctcgcctcaggcgtactcatcggtgtcggcggcgttcagctcctcggcgagatgattgcgctcaaaggctgggcgtcggctggaccggcggcgtcgacgccagaggtaagggccaagggccagcgtcactgggagcggcggtggaagtggctcgtcggcgtagaggggaccaagtacgttccttctaatgagaagatgtttcggctggcactgactgcggtctctctcgctcgcagagcggtcctccgcctgattctcctgctcttgacttcgcggccgctgctctcgccgcccctgccatcgccctcgctcgacccggcgcttttcgcggccgcgcccgctggctcgacgaaagccgagccttcagcagcagccacgggccggccaaaggacccgatccgcgagatcctgctccccaagacgctctttgccggctcgctcacgcccggccgcgagctcgtccgggcgctctcgccccgcggcatgctcggcgaggccctttactctgtccgtgggctcatctacgtcctcatgctccggacccgatcgagctcgctgcccgtcatcctgtcgctcctggtggcgctcgtctcgcgggcgctgcttcgaggccagcaggcgactgggtatcgcaagggtaaggagcgcgagggagcccaggtcccgttgagcagtcttgagcgcgacgagtttgcgcgtcgtgatcgggcgctcgggggcctgctcttccgaggcgtcgtctgggacggcttgacaaagtgcgttcgatttctgccctcgctcatcgcgcaacgccctgactcccctcacacgcgagcacaggccgacactagaggccgtcgcaagcaagacacagcggatcccgctcgtcggcctcgtcggcggtctcctgagcgactacgtcccgctcatcgactcattctactactacaccgcctcctgagccggctatgaccatgcgcgacgtttcgaataggacggagcatcgattagcccctcgagcgtgttcctggaagcgggatcgtcagcttgccgctaagaccgagcctctcgcggatcgccgaaggggtcgcagcaaagccgccctccatctcccaggcccgcccgcaaacgcagccgcagccggtcggacactcgagcgcggcggtcgattcgtccggccgagttcttgtgcccgagaggcaggaggggtgagtgagatgatggcacttgaggcaggggaacgacaggcctgaagcggggggaggggtgagcggtggaagatcgcaaagggagacggcggggcgacgcaccatgaacgggcttgcggcagaggtcgcagagggcgtgggcgaccatgcgaatcgggaaaccggtctcctcctggcgctttgtctcgcgtcggccgatgtcgaacgacgtgacaacttggagggctgtcgtcgtgatggagaaggcatcagcttcatgggggcagcatgagacagcccgcgcaacgtacgcggcttctgctccttctgcatcgacaggtggtacgccttgccgagctcggcccgcttctggaagaggctccagcgccagaggaagtcggcgtagcccgccttggctgagtggaagacagcgaggaccatcggatgtacgcaatgaccgccggcgacgattgatctgcagcaggggcggtcagcgatggggttaagtgcgcgagaaaggtaggctggagacgacgcacgaaactggcgccggcctctcgactcggaaggttgccttgatgaccattgggcgcttcgccgacttcttgctcctcgagccaccagcgttaagatcgacctcggcgacactctgcatcttgggcgcggctccgtacgaggccgcgccgttcccggatggcccagagccaaagaggacctttgagcgcaagctgtgcccgctaggcgcggtcgggtccgactgaggtcggagcagtgttggcggcgagttctcttcctctcggcgaaggcggcctcgtcgacggtcatcgagcgtcgaggcgtccgacgactcgggcgggcccgagtcgaccgaagcccggtgagcgtcgatcgggtgcgacgagtaggattcgtcgccagcgccactcccgccggcgccctcgcggccgagaaaggtgtccctgaggctcggcggatgcgggatcgagatgttcgagccgagtaggttgaagccgctgccaaacatcgaccagcttgaggtgttgtcgcggtacgagcttcgccgtccgggtccagggctcgcgttgctggctggcgagtggccgcgcgaggtcggttcggccgtgcgcgaagggagcctggatagccgaggtctcggctcgacgggtgggggaatctcgcggccaccgctgaaacggacgacgctggccgtcgtcggctggctctgtagatgggcggacgggtacgaagagacgtctttcttgagctgcaagacgacggccatcgaggcgagcatctggacgtcgccggcgctaagatactcgagaattctggatgaagttgagacaggtcaggacgttgtaagaagggaccaggattacgcagggcgctcacaaagcgttcagctgcgccatcgacgtcctgtcccgcagccgctcctcctcgcgcatctgaacgagaggccggaccggatccgtcgcagctggctttggcgtcggagtcagaagaagctcgagaagctgccagccgcggacgtgcgagtggtagccgagtctctgtgcgacggcgaggttccgacggcagacgttgagcgggaggcccttgaggaggtacgcctcggccagcgcaagcctcgggtggacaaacagcgcgtcgacgttgcggatttggaggatcgacattggcttttgggtccgcgaggcagagcggtcctgcaagaggagcattccggcggcgcgcgagttctgcacagagtttgagagcgtcagcggcagaccgtcttgcaatctcgttgtgcagacgcagggtttcgttgagcagacgcaccgaggagtctgcgtcgctctgctggggttgcaggatcttgggcgcagccttttggccgtttggatccttgatcgaccggtagaggagcagcatggcgtcgttcatcgatcgcgtcgcagcaggctgagctaaattggagttcgacggcgaggcgcgcaacctgggctcgcgctcacgatcgcgcgaaactgagggtgaccggtttgagaagctgcctcggttcgagttgaccgtggtcctgattgtcgtgaacgagacgaggtggcctgaagagatggaggaccgtctcagcctttgacctcgacagaagaaacgatgagcgactgaccgccaaagccgaagacggcgccacacggccgccgaaggtgctcctttgtcaggaccgtctggacagccgagggcacgccattctcgccgtcctcgtccgacgatcctgaatcagaactctcttcggcgacctcctcggccttttcctcctcccagaagaccgtcttctggccgcgcgaccggccacgctcgtcctcctcttcgatctcgcgaccgaggaggatccggaagacgaggtcgagacagttgcccgagctgatctcgcaggccgagcgaacagcgtcgcgcacgcgctgcttgcaatcgggctcaacgatggtccgcatctcaagcaggtcaatcgtcggccgggtcgaactctttgggtacgtcggcggaaaggagaggccgatgcggatgaatgtcaaggttggtaccggcgcctcggtcgatgcaggcgggccccagggcccgtttaagctgaagatgatcttgcgcccggggatgtcgaactggagaggaggcgagcgagagtcagggagtaggacgtggtgatggagggctctcgacacgcaccgtctcgaccttgatctcctttgcataaatcggcaaaacgtccttgaactcggtctcgagccggacaacctcatcctcggcgtcccagttcgccgagtcggagagctcaccccgcaagcgcgatccgctcgcagagttccggccacgggtgcctgaccgcgacttgctgagcgagatcgagcgtgcaccgccggcactcccgctcgacgagaggttaaccttgctgtggatgtactagggaaggcgcggtaaaggtcggtcagactcgattcaagcggggaggttgcaacgacgcacctcgacattgtcgttccattccatggcgaccattgcatctgtcttgccggcgacgccgcgcgaggtcgtgccgcgcgtcatgacgggtttgcgctccttgccggcgctgacactccgccgccgcttctttgtcgactcgctctcgtccttcggcttctcgggctcctttgccgcgacgtttgagagtccgccagaggacgagccggtgctcgagagcgagggcgagagcgcgttccggagatgatgcgggccgcgatgatggtggtgatgatgcgtcccggttcggaccgtccgaagaatattcatcccttggactggcgccgaaatgtgcgggccttggacggggccaaagaagccagatgagccaaagcccgagctgctggcctcggccgaggcgcccgagaaggatgagtggaggttgaaggccgaggcaagcgaggcgtgctgcgggtcgggctcgtcgataaaggtctgatcgaccgcacccttgcgcgtcatgataaccttgatcgcagactgcggcttgtgaccagcgtcctgcagagcggtgccgagaatagcgatcagtttcaagcctccggaacagcagcttcacgactggacgcacgagcaaggtgccctcgcggatcggccagaagcggagtgactgatccatgccccaggtaatgagctggaagctccggtcatcctggtcgaggtcctcgccgccgcggatgcgccagacaaactccttgaccttgtcggtgtggccctcgaacgtcttgatgacgcgctcgcccccgggctcgccgagggcccagaggtcaaggtgcgtttcctccgactgcgggagcgagagcaaacccgatccaaagggaagattgcgcgctcggaagaccggggcgctcgcctgaatgacgcgactcggcgtcaggttgacggcggccgaatcgcccgtcagactctctggcgaccagtggacaggtaagcccgggtcgaccgagggcgtcggcggctggacgtggatagactcgggcaagaacgaggcgacgctcgacggcagagcctcgtacgactcgaccgacgagttgagcgacgggattgaccaagtcttgattgttttgtctgcaaggtgagggcggtgattagcggctgagacgagcgctgcggccggtgggcgacgtaccgaacgagcaggtgacaatttcgtgagcgttctcgcggctccagtcgataccgtaaatcttggccgagtgggcggtaatcttggtgacggggatcgagcccatccgcgtgtcccagatgaggaccttgttgtcgtgcgacgaggcaatgacatgctcctttttccgattccatttgacctgcgtcgcgcctgagccgaaaccccaggccgagaagcgctcacagtcgcggtccatgctcgtccgaacatcccacatcttaatgaagccgtcgaggctgccggtcgcgacgatctgcgatacgtccagctcgggtcaaatcagtcggctaggcggcagcgtcgaaacctggacgcacggtatcgttgaagacggcccagttgacgtcggtgacggctcgccgatgggcgacaacctcgcgctcaatgcctcgctcgctcggcaggccgaggttccagaggagcatcttctcggacgaggtcgagacaatgtagtgcggcttcgacgagtgcggcgaccactggacgtcggcgaccgagtgtaagcctccttgcgggaggaagcgcggcacccgagtcggcagagagaggtcgataatgtagagaccttgccggctgtcacgaaggaagaccggtcagctggcagcacacgagcagcactccgagggttggacgtacgcggcgagaacgacgctgcaaggtcacatcagaagtggtcagcaggtcgttcagatcatcatttggcaatcaggactgactctcggtgagctgggctgatgctcatactgccgacgggcgccttgaccttaatggcaatctgctggcggaacgtgtcttggccgtcctggtcggcacccgagccggcgctgctgatgttacgcctcagccgaggccgaccctcgccgtcttcaatcccgggcgtgctaggcgcactgtcgccgccatcataggccggcgatggaggcgggaagcgagacgttccgaacgagctcgtcggcggcgttggcgaggtcgacgtcggccaaagcgacggcggcagagcgaacgtcggcgtgaacggccgtcggccggacgacgacgacggcgactctgggagcggtatcaagggcggcgacagagccgaccgagaaggaggtagcctgcctgttgctgctgctaggagcccgccgggagactgcggtctcggcgaggacgacgacgatgggccgccgggcgagagctggccgaccggcgagctcgggcggggtgagctgggcgagaccatctcggagcgtccttggccgaagaagactgctcaaccacctgcgaggatgtgagagctgctttgaaaaggaagggcaagagttgtgcggtcgagatggtcgtcaagggcaggcggatgaccgggccaacgtctgccccttacggccatctcttccttcctgctctccctcgaattctaactcagcgggcgcactcagccatggccagcccttcctcgctgccgtccgacaaggtgcttgtgacctcgctcgctttgcccgtccggctgctctcgggcgaccactggtcgaggccgtcgcttccggcgccgcacctcctctcgttcgtgctgcaccactcacttgccgcctcgggctcgaccgacacgctcccgtcgacgatcaattactcgtcggcctcaaaggcggtcaccaaggtcgtcgatagccgcgactggccgagcctcgaggcctgcgcagaggcggccgtcggcgagctacgggcgatgggtgcccggggcctggtcgaggtcaagctcgaggcccagaagctgctcgtcgcctcccgggcgagcgtcgagatcgtctcgagtagcgagggagggcccgcgacgcggtcgatggcgctctcggaaattgttgtccgctgcatcattggcgtcaacccgggcgaacgcgtcgagaagcagctcgtgcaccttgacgtctcgttcccgctgccggcgagctcgacagaggacggcttcccgcacaagcgactggctgaggaggcccacgaccacgtcctgccaacgtcgtttgggacgatcgaggcgctcgctcagtcgctcgccgatcacctgctcgcggtcgacgtcgcgcctcacccgccgctcgcagaggtcaccgtccgtgtctcgaagccgcacgcgttgacgtacgccaagtacgcatcggtcgaggtcacgcgagctcagccgaccggctcgctgcaggccggtgccagtgcgcatcgcgacctcgacggtagggcaacgcgcgccgtcattgcggttgggtccaacattggtgaccgggtcggcaacatcaaccgggccgtcgacctgctcgtcggtgaggccggcaacggaggattgcatcagacgactctgtttcaaacgagctggctctacgagtctgagccgatgtatgtcgaggatcaagcaagattcgctaatggcgccgtcctcgtgagtaccatcttcgtcccagccagtctgacgcatcgctgacctgagggcgttgcgcagatcatcacaacattgtcaccgaccgagctcctcacccagctcaagcacgtcgagacgacgattggtcggacgcaaacgtttcgcaatggcccgcgcgttgtcgacctcgacctcgtcctgtacggcgacgctgtcgtcgacgtcgacacgcccgagggcggcctcaaggtgccgcacatcagcctcgtcgagcgcgagtttgtgctgcggcctctgatggagtacgtcggtctgtcaaaagcaatttcgacgcatcggctgacctttatctctcactctcgcccagcatcgcaccagattggcttcacccggcgctacagaagcctatctcgacactttacgccgcgcttcctccctcctcgcctccaatcctgcaccggatcctgccctttcccgcgccggctctccctcttgtctcaatccggtcgcggccactcatcatgtcgatcctgaacgtcacgcccgattcgttctcggacggcggctcgtttgccgacgtctcggccgtcgtcgccgccgcgcagaagatgattgccaacggggccgatatcctcgacgtcggtggtctcagcacccgaccgggcgccgcgccgatcctgccagaggacgaggctgcccgggtcgttcccgtcattaaggcgctgcgagaagcaggcatcacggccccgatctcggtcgacacgtatcgcgcggacgtcgcccgggctgcggtcgaggccggcgcgtcatgcattaacgacgtctacggcggccgcgacgtgggtatgctcgccgtcatggcggcggccaacgtgcccgtcgtcctgatgcactcgcgaggcgatgctgcgatcatgacgtccctgacgacgtacgacggcgacgacgttgtcgccggcgtcgtctcggagctcgcagcttcggtcgaccgcgctctcgcggctggcgtcaagcgctggaacatcatcctcgacccagggatcggctttgcgaagaacggcgctcagaacctgacgctgctggcttcgctcagccagctgaccaagggcgcctcgccgcttatcgactacccgctgctcgtcggggcaagcaggaagcgcttcatcggcgagctcacgggccagacggagcccaagaagcgcggctttggcacggcggccgtcacggcggcttgcgtccagagcggggctgtcgacgtcgtccgcgtccacgacacgcgtgagacctgcgacttcctgagcgtccttgcggcgatctgggcagcgggcgggcgtgtccagcaatgatcttgcaaggttttcgctggctcaatccccagctcgcagccgtcagagctggagtgctggccgacgaacggtcaggtggattgtcttttcatgagcatcgctaggagtctactgcttgacgagtccctcaatgacggccttctggagcgcccgttcgcggccgctgaggccgttcgcggaccagccgaggccgagcgtcgtcagatcgagcgccgccttccgaccctgcttaaacgcgcccgccccgctgtcaccctcgccggccgcggcgacaaagcggccagcggcggcagcgagcgcgtcgacgtcggtccagcggccgtagtcgccctttgcacgctcggcgtcaatctgcgcgaggagctcggcgtgcgcctcggctgaacccgtcggatcaggcacgggcgggtgctcgagcgtgacgagctggatcgccggctttgagcggtagagcgccttccgcccctcgcccttcttcggatccgacggaagggggtcgtcgtccgcgtcctcgacgagcgtcgcgtgcgtcgtgagccggaagacgcgccgcgggtggggcttgcccggcttgtacgggtcaaacctcctgctgagctcggccgtatagtcgaccttgccggccggcttccacgtcttgctctccgggtcgagctcctcgaccgtctggctggcgagcccttggtcctcgcgcttcgcgccgcgcgtgagcagcatcggcagctccccgacgagcttctgcgcagcgccaagcgcggcagggccgaggctcgcgacggcaagcaggtgctcgttgtttgtccggtgcttgaggacacggaggcccgaggtcggaccctcggcatacacctctgcccggagcttctcgtaaaacggcgtctttggcgggaagctctcggacgggcccgacgcaaccggcttgtcggccgcggacgataggaggaagtcgtccgtcgagtagaggtcgacgtttgaaggcagcgtcgccggcgcgagcgcaggctttgcgccgttgccctggctgaggaaggcctcgcccgtataggccggcgacttgcgcgagccgttggacgaacgagcgccgccgcctcctcggccaccacctcggccagctcctcctccacctcgcgcaccgccacggccatcacggccgccgctcttcaagccaccgcgactgtagcccccctctccgccggcgccgccctcgctcctgtgactgccggcgctcgcgagccgaaccgccggcgtcagcgtcgcagacctgtaggcccccttgttctgcgcggcgttcatgttctccctgtcgcgccggacgaggtcggcccggggaacgaacgatgcgggcgcgtcgtcgaactggccgggcgaggacgaggacgaaggccggggcatgcgaggcctgctgccgcttggggcaagcgacgggcgcgcagcgagggccgagccggcctcaccgcggcctgcaaaaatcggggggaaggatagggtggtcagccggggcggaaggtcggctcgcccgagcgaagccagcatcgctcgagccgagcggcgtttcgaaatcggccctgatcgaaagacgacagggaacgcacgaaggttgacgcctccctcggaccgaccacggccgcgcgagtcgccgagtctaggctgctgcgagctgcctgccaaggagctcgagcgccgtgatgtcgggcctgcgaaagcgagagagagagcgaggcaaagcggggtgagcgagaggcaggccagcgtaagaggtggcccgagggacgaacggtctgttggctctgcacgtgtgacgggcgagagggcaagcgagcgtgcctggagccgcggtgggcgggacgagcaggcgcgggcgaacatccttgcgggagaggtgaagggagggcaagagagggagttgaggagacggcgagacggaggggcgggcttgaaaacccatcgggggcatcgggggtttccattgagggtgtcacacaggttggcacgggcaagcgtcacctccgcctctcgctctctcttctctccatcacaccctcttcttgcacccaatgccaccccgcctgctcctcttcctcctcctcctcgtcgcctgcgcctcgacagcccatgctttcggcgcaggtctgtccaacctcatctttgctcgcccgctcccgcccgctgacgccttccgcacgcaggcaacatcccgtcggtcgccttctacgagggcaaggccttccggcacggcgacattgaagacatcctgaccgagatggctaagaaggtgagtcccggcatactcagtccgatcgctgctaagtagagaacgagccgcctggcctccacttgaaaaggagaaccgcgcactgacgatcgctcaccccgctcgctcgccaggccggaggcggcttcctcggcatcggcggcggagccaagttctcgcctctcgacctcaagcgcgtctactttggcaactggtgcgttcgtccacgcgggtaagcagagggagcgaccgcggatggaggaaggcgaggggtgctgctcgatcaaggcgccgtcgcctgcgcctgctgctgctgcggctggtctcttgccattctcgcccgctcgctctgccactcccgactcgctctccgtctgtataacctcatcagcctcacctgacactccctcccttacctttcctgcaggctccgcgactactcgcaggcaatcgacattggcacgctaaaaaaaacaaactaccagacgattatcaacctgctgatggcgctcggcttcatgacgtttggcgtgcgtcccactgcgagagatggctgatgggaggcgctgctgacaacctcttgtgctctcctgcctcgtgcagtacgtctcggaggagttgtgagtcctgcttcctcttgcgccgtcctcgacgcatcggctcggagctgatcaaaccctctttcggccgctcagcgagatcaccgagggccggctcggctgctatctgcccgtcgagcacatcgacaacccgaaaggctacggcgaaggtgccgacccgcgccagttctaccccggcctccggccgccggtcgacccgcgcgaactccagatcgacccccagacgggcatgaaagcctacattgcgatggagggccatggctgggacacgagcaagagctgtgtccggcggacgattgagaagtgcatccatcatgggcggatgcaccggtcgaacgggcggaccgaggacgagtacgaggcgtaccggctgctcggccaggcgatgcacacgctcgtgggtcctctttcttgagaacagaggaagacgctctcgctgacaggcctgcatcctacgcgtcgcaggaggacttttcggcccactcaaacttctgcgagctcgcccgtgcgtcgctcgacgctttcactcctgactccgctgaccccttcgcccctcttccgtagtcatcaagctcggccacaccaacgtcttcccgcacgtcggcgccaacgcccggatcaaggccccgaacggggcgatggtcccgccgcttgtgaccggcacctttggcggctcggatttcatccactcgctcctcggcgaggcgggcgaccacctctccgaggcctcgatctcggacctcaacaaggctgtcaacaaggcccggagcgacccggcgaactcggacaacggtcttgttggattgttgcggcagatccccggccaggacggtgatcaggcgagccgcgacatttcggacatccgggctggcgccggaggcgacccaaacagcatgtcgccgcagcaggtacgttaccgcgcgggctcacctttatcctcgctggccaggctcagactgttcctcgctttcgctcccgccagctccacgagacgctctggaagattctcgtcttccgcgacaaggtcatgaaggggatcgagacgacgatcgaccggatcccgggcctcggcgccctgctcgagaagattacgtcgtcgatcaatggtccgtcccttgtggagtcgtacttgtgcctttggagactgacacccttactctcgctacagtcttcatcttttcgactatcgaggtgagcccccttcagcctctcacaggtcgtcgcgtcggctgacgttgcgtcgctttgacagccctacctcggcccggtcctcaagcaggcaacgggcgggctcaacaacctctcggaggaagttatcaacaaccccgagcagtttgccgtgcggtcccgtccctcgcgcgctttgtctctcgaagacggctgacctctcgttccgctcgtcgcaggtgttcgacaaccccaactcggacgacccgactcactcgttcctctccaaggaccactttgggctgattctcaacgagccggccggcaacctcgcaaagatcgtcatccggcccgtcatcaaggccgtcgtcgaggcttgggaggaccagggaatcgacccgaggcaggtcgccgaccgcgcgtgcgaagcgatgttccatccgtactttggcaacggccggagtcaggtccagcaggagatgcttgacgtaggttcctgtttctccctgcctctgtcgtctgcgttctgagtcgctcttttccttcccgtcgcagtacatgcaccagtggatcgagtcgcaaggctctcacaagcacgaggtcctcaaccggctgacagccgctaaggtccggtccaacgacaatcggcggatcggcgacacgtcgagcgtcgcgcactcgcatgaccacggaggcgtgcccagccaggggcttcagggcgtgctggcgacgcacaacgtccatgtgccgggcgcgcagtacctgaacgtgagtcaacgcctttctcccatcgctcactcacctcattcagctctcgagctgacgccctcgtcttcctacagatgggccaggacctactccagggcaagatgccgggctcggccggcttcggctcgtcccagggccaaggccgctggcgcgacatggacagcaacaacaatggcggcggtggcggccagccgtcgtaccagcagcagcagcctcagtacggccagcaccaacagcagcagccgtcttacggccagcctcagcaccaccagccgtcgtataaccagccccctcagcagtcttacggccagcctcagcaccaccagccgtcgtataaccagccccctcagcagtcttacggccagcaggtcagttgcagtttctcccctctcttactcggttccgaaggctgacagacggttgcctcgtttcagcagcaccactaccaggccccgccgcctcagccgtcgtacggcgccggtctgcctggaggctacggcggcggcgggcagttcgacaatggtggctttcccgggcagcaccagcatcatggaggcggcggccagaacgacgactttgggcgcgagaagcgcggggaggagacggaccagtggggaaaccctgtccttcggccgtcgggccaccacggcggaggctatggcggcggaggaggctatggcggcggaggaggctacggcggtagcggaggaggctactgattgacgcccgcgttccctagacgagctatgcatccctctcttcttgcttttgacgtggcaggcagcttgaaagagaacgaaggacgggggaggtccgggctctaaggttcccgcgcgcagcgcttccccgtcagctcacccgtcgctggcccctcccaacatcgatcctcgacctgccatttccctccaatcttgactcgctggcctgccctactactggccgtctaccgcggagcggcttcctgtcatcttcgagctcctcgctagctcttgcgggacatcctcaaacaccgcgagcaagatcgccctccgagcttgccgaggcacgtcaaccgctcgacgccagaagacctaacggcctggctgcagctcgccttctcgtctctcgagatcctgtcggagcagccgaatcgagacgatggagccggcagagtgcgtcccgagctcatccgccggcgctcgagcgtcctcctgccttgatcggatggagagctgaccgctcccttgctcccgcagctcgtacctgccacgggtgattggtatctttctcgccgtcctcgacccgtcgcagtcgggcggctccaaggtactctgtgcgtcgcctgcttgcttgcttagggcgagcgctagagtcgggccgctgatggaccatctcgaccgccgccgtcgccatcagaccaggtgccctcgaacctcatcacgacctcggcctcgtcgtcggcctcctccgcaccctctgtcgctcatccactctcgcagtcgctcgctgccctctcggtcaacggcggccgttcagcggacgactcgcagcagcccatgagcggcgcgagctcggcctcgcgcacgcggtcgcctcatgacccccggtcgcggtcgccgctccgggagccgctcctctcgtctccgaccggtgccgccgccgccgctatgtcatccgcgagcggaccatacggagtcgatccgccaacaccgttgacgcccgagacgccgccagcacccaagcagccgctcctctcgttcgagcagattgcctcgttctgcgtccctcagacgccgctctgcaatcggctctgcaccatcacttcaggcgcctacaagatccagggctacccgatgctccacgaggataaagacgcccgcaagggctatgagagacacgagtttcgctggaacatctgctgggtctttgaccgctggaagtaccagggccaagagtacaaccaggtcgttcgcaaggtcgcacgcgtcctggcttcttgcgaggtgcgtcgagaggcgcggttgaaggattacgttgcgcgtctctgacctcgattttctgataggaggacagttgcttcatctcgtcgccggcgaccgggcccaaggtcttcgagatcctccagcagctgatggaggacctcaacacgtacgccgaggcctcgatcccaatcgaccagagctcttcaattgagatcaagctgtttccaaacctgccaaagtgggtccggggagccgtcctcgtcctcgtcgggacgtcctgacgccgtttgtcccaccctcgccagcccaactaaggtcgagaattggcacgtaccgatcccgttgatcgagcttaggccgcagctcaactgggacctttcaatggctaaggtgcgcgccggcgcgtggattgtgctctcgcaaactctcgcaaactctctctgatcctgccatcctcaggtcgtgcgcttcatcgatgggacgacgcacgtcaagcacattgccgagcgcgctgacgtcgccgtcgactttgcacgaacctgcgtcgagcatctgctgtcagtcaggcagcggcttcagctcctttcgaaggctgaccccctttcgcgatcgccacagctactacgaggcggtcatgctgattgacatctttgagtgcgtgtggcttggcgctcctttcgtgatatcgaactgacatgagagttcgtttcaggtggtcaaacatgtgcgtcggctctcttgcttgccccaccagaccgctagcctaacgctcacggcccctttcaggtacaccatcaaaccatccttccagacgctgtcggtcgccgatcacgtcatggacgagtgcgcagagtactgccggcgcgacggtgagccccgtgccggtgcgctttttctctgcatctcagggggctgacccctttgctcagcctacggcgacccaatcgaatgggcgaccctctgcagcctctatacccgctttcgacccggtctgacgatcgacgactgggaggaggatcaccaggtcgacgcgctcggcatcgacgtccggcgctttgtcacgtttggcgtcatcaagggcttcctccggcgcgtccaccgatggcccatcttccagcccaacgagcaggctctgcaagacgagggcgacgagacaccccatccgtttggctcgcctcggctgagcgccggcgagagcggcttcagcctgcactcgctcggcctggccggcttgaattatccgccgaccgacgagtcggccatcagcctcgactatccgcaccaccgccgatcctacgacctttcgcccaagacgtcagcctcggctgtccctcgtccgcggcatcggacgctctcgcgagcctttgaccaagcgcacgatcggcggtcgatgccgccgataccggcctcgcaatcgccgacgaccgtcttgacgaccgtaggcggccggtctacctcgccctcgagccagtcactctcgctcgatcacacccggccgggcgccgttcatcatccacgatcggcaacgtcccgtcgacggcgcgaccgggtcgatgccgaacaagcgacgccctggggcagcctcgggtacccgcccggcctgtcgagggacctgctcgacggcgatcggcacacggacgacctcgggtgcgaatttgacttgccctgggcgggtgagcacggcgtgcacgaggtcctcgagacgtttgcgcgcaagaatggaggcgacgtgctctatgtcctgcgctgagcacgatctggcgcctctgtaatgaccatgtgccttcgcgtttgtactgcttccgagggtgacgcaggggacttcggaggcaagccccctctcgcagcccgccgcagcagcgagccttccctctcctcctgtcacccttaaaccgctttcccatcctcctctcacaagcagcagacgacacactggatgacatccgcgcatgctgcaggaccgcctgtagctgtctctgttgtagatgggcttccttcaccaggctcgcctgcccaagctgcccttcgaccggcgtcgccgcctctgagcctgccgccgaccgagaaggcgaggccaccaccaaccggctggaagcagacgctcaaagacatctttgaccagtcgcccgaggctcagagagcacgggccggccggcccgatccttggttctcacagaagtttgccgtcgggtgcgtccttgatgagcacggcgcacgagctgccctctgcctccggccttgcagctgaccgacctgcgcgcctctctctgttacagcctcgtcatcctctttgtcggctggacgatttacgtctttgtcgtccgcgtctgcgttcgcatgatccaaggccgagcgctgtcggtcggcagaggaggtctgtaccctgcttgatcgttggactgccgccctggccgcccgaccgctgacatcggcccctgtcttcactagtcgccttcgtcgttgtcttcttcctgctcctcggcatgtttgcatggtcatatatccggatcctgactgcttctccaggagacgctcgagacgtacgtcgctcgtcctcgccccttctctgtccgacgctcagcaacagcagagtttgaccccggctacgcgctcaggtcgtcccgtctggcctcgagccctacgttcctagctcgcctccactctcgtcgcagcctcagcagcagcacaatccagtcgacattgagatgcgcgagtcgcacgagtcgtacgcgacctcgtccttccctgacctgtcgacctcaccctcgcccgcgtcgccgccgacgccccttcctccaactcacatcgatccgaggccgcacgacactctgctcgctcaagcgccgggcaacgtgcctgccaaactgaggaaggggacgttctgcgcctcacaatcgaagaggagggccgtcgcaacgagtggcgaggagggcaaggcggaagaagagctcgagaggcgaccgctgaggccagaagaggatgggaggtggtgccagcattgccagcttgccaagccgttgcgaacccatcagtgcgtacctcttctgtagcctcgccatccactgccggctgactcaccggcaccagctcgagcgcctctggccgctgcgtccgtcggatggaccatttctgcccctggatcggccaggaggtcggccagctgaatcacaaggtgcgctcgggcgcgcgtctcggaatctgcgatcgccaggctgaccgttgctcaccctgtcggcagttcttcctcgtcttctgcttctggtcgacgtgctttaccttcttcatcttcgtcgcgacggccgtctcgatcgaaggactcgacatggacggcatgaccatctcgctcctaccgctctcggccctctttacgctcatgaccggcgtcctcgccggctcgcacacgtggatgctcctccacaacgtgacgacgctcgagcagatgcgcgtccaggactggcacgaggccgaggaggccgccctctcggtccgctaccgctggtacgagctcggcaagaaggaggccgtccgcaagcgctggaagcgcgagtgggggaccgtctacgtcgaaggcaaccgctggtttgtcggctacctatgcaactggcagagcataatgggcacgcgcaagcttttctggctcctcccgctcagccaacttggcgacgatggcatcaccttcccggtcaacccgagagtcggcgcagacggtggctggcggaagcgtgagctctggccagacgcgttacaataacgaagcctattttacgttctcgacgcccgactgatgtccttccctcacgatctgatgaccttctcatgcgagcggcaggaacgaggtgggcggagagacacgatctaagtaaagtacaacggcaaggtggaggagcgctagacgatttgggacgcgtcgcctccgaagagatcgagccggtcgacaatctcgtcgtgctcggtccgctggtaggtcgagatgcgctcgccaaagtcgaacaggtctgtcgaacgacagggtcagcgatcaaagcggcgtcgacagtcactgcggcactcactgtagaccctgaaccggcgagagagttctttccggccgtagccggctgagcagaagggggatagcagccgtcagcacaaggtgctgccagacactcttgcctctggcgacgtacaaaacgagcctccgcctccaaaacattgccagatgccggcggtccggcggcagttggccgacgtgtggacgtgcccgttgccgacgaccttgacctcgttcagagcgacacccgaggagctaaagccgccgctgaaggcctgcttgagaccgttgaggaagaagcctccgttgatcttcgacgagccgcccttttcgtactgaggtccgacgtcgagcgggactctacgtgcaaagtgtcgcaaaggttagcaggaggatcgcggcgcggcgcggcacggacgcaggccgttcgatgaagggcgcacccagtatttgggtcgagatccgggtcgttgccgtgctcaatgagcgggatgtggaagaaggcgagagcgttcggcttgcgcaaaccaacgtcggtgctgtcgctcgcctgacgggccagtctggcacgtcctggccgttcgcgacgcttccaagtcccgccgaggtcgtcggcaccatccgggacgaagggccgctggattggcttgatggaggctgacgtgctcagataccactcgacctgcgactcctgcgaaagcggccagctgccatcagcgacgagcaggctacagatcagagccgccggacccagtcacgcacgcggatgtagtcgtactcgagcttcacaaaggggttccatgacgacgaggtcttgatgtagtcgcccgagtcgaggacatagacgcttgcgaggtggatcttggacctgaggcagagaggggcatcagcgggccgactgagcgatgagggatggaagacgagaacccacgcgtcgtgcgaaagaatcttcaagagatagttgccgacgccgtcgacagaactcggcccagcctggcaaagggagtagggcatcctagacagcgccgccatctgctcgcttttactcgtcccgtcctgcgcgtcatgattgccaaaggtggcggcccaggggctacccgacgcttttgtcagctttgccatcgacgcggcaaggatgctggaagactgacatctgccgatcgatcacaggcttggcaaacttggccagcacgctcatcgcgtcccacgttgtctcttgctggagggtcagggcagagaggccagtcagctcgaatcgagtggtcgagcagccaagcaggacgcacgccgttcagctgatcccctgtgaagacgacctgttggagataaattgcaggatgttgtctgtcagcacgagactatggtcgaaaaggaacaaagggggctttgcgcaccaggtcaggcttctcggcgtcgagagcgcgcgagaggaactctgcggtgtcgatgtcgccagagcagggcgtcttgggcgtgtcgcgacagacgccgtatgccccgacgctatagtgaaggtcggcgacctgcaggatccggaaggtgccattggctgacatgcgcagctcgggcgctttcgggatgtctgagaaggcaagggaaaaaaaatcagccttctccactgtgaggagcttcgccagatagagggccagaatcacctggaacgcccatgcgaacgacgagaccgacgctcgctcgatgtcgcttgctttgctcgagaatgagcggttcgatcttgacaaagccgtgccagggcacgtcgtcgccgtacaggacgtcaagctcggtcaccaccagcttctcgtcgaccgagtctgcgtcttccgacttgttgttgtcgtcttcgtcgatcgagtcgggcgccttgaggccgggagggtagcggagcttgtaggcgagcctctgctcggggagccgcggccaggcgcccgagtgcagatcatcgccctgggccaggatgaagccgggtggaagcggggcgcccttgtcgaggatggcgaccgaagtcacatatggcactgtcgtcggttgtttgattgtcaggaacggctgggcctagcaggatcagagtgaggacgaaccgtcgaagcgtctcgtgcgtcgataccacaagctcagccaccagagaccagacatctgcgaggatgagggcagtcagtagggagatagttagcgatagcgaatcggtcgcaccgcaccttgtttagatccttgtccactcgcacccacttgccgagccgggcatcctcctcgggcgtcgtcgttggcgcgcagatgtcgccaaagatcgcaggagctgaggagcgcttccgatcagcacgggcggccacgagaggtcaggtcgtcgggctcacaaaagacgcaggctttgactgcaaaagccgatcagattcgtcagtcactcttcgcaggctcgaacccgtcgcgagccagcagcgaggtcgcgacgacgcgcagctccgaacgaggaggactcaccggcgatggcagtcactacgaggagcgagcgcgccgagatcgggtatttgaaggtcagctctgtttctgcaagcattggagggcagccctgagacttagactcacagccagtccgatgcggaagcagcggattccagctgtcgagcggcagcgcgccgtcgatgctctcgccctccggcaccgaggttgccgcatcgcccgcgtgctcgccgttagctgcaccttcctgcttcggagcgaagagctggatggcttcgttggcctgccacgacatgcgcccggtcgggcccggctggaggttgccatgggcgagggcgaaatacgtgaggaggagggcggcgaagccgaggtagaaggccaccggcggcaggagcgaccggacatagagcaaaggggggaccctggccgtcctcatggcttcctttcgtgttgcaacaggtcgagaagagacgggagctgctgcgacgtccaggcgaaagagatgctggttagcaggcggggaagcggggctcgacctcgccggcctcgtccggccgacgacgacctgcttctacagcgaaaacgccctccaggctgcccgacagcagaggacagccaaacggctcgccagatggccccttccagctcattcaccttccagtgcggtccagagcgagacgacgacctcgatcagccgtcactgttgagcacggcaaccgcagcaggccgaggtcgcccagggcggtcagctccggaggataccgaccgagccactcgagaaatgacggctgcccagccatccagcagcggcaagcgaggctggtcgatcagcatcggtctgagcaacggagcgtccgatgggactgaagctgccctcagtgcgtcctgaccggcttacgggcgcagggccggccggagttcctcgatctctgacctgaagctggcccttcctacaccacagcagatacagactccgctcccaagcggcgcagaggattgagtgcggtccttgtcgatgttacgctctctggtcggtcgcttggcgctcctgtcatctcaagccgcccgagctgaccgatgatcctcccattagcgattgtgctcgggtcagctctcgggatcgtcgcgtatcgcctctggcaagaccgcggccttgctctgtcgtcagcaaccgggactaccagcacccgccggcacgagaagagatggccagtcttcggcgcgcagcatcgaccaagacgatccaggttacgcctggcgcgagatgatctgaccggcgcacgcttgccgtcaggacatgagggccctccgccgccctacatggcccttcaagaggcttcagatgtgcgtatgctgagctcgaggcgccgttcgacctcggtctgacgagtggttcttctcgcatagcttggtgcggcgtgcggacccagctcttcaatcgagtcgctccaggatcgctcgacacgccttctcgctgaggcccggcaggctcttatgagtccctggccctctgcgccgtcctccagtcaatggtcagcatcggatcggatggcagaatccagcagccgatcgccagcctccggccgcgagggaggggccgcaagttcttcaacttgctccgaacgttcatcgcctcgctcggatctctcgaccagactgtcctcgacgtccttctcaaccagctcaactgccgcattgtcttcttactcttcttctcggcgcttggtcagcgatctttcagattgcagggccagcgccgaatccgctctgcgacgcgagccagacgacgcttcgagtcgtctcggagagcttcttgcccggacgtccaagagctacggactctcttgactcgactgtcttggacctgcggcgcttctgtcttcggcataccgcttccttggacgactcttcatgatctcacgagcctcatccctgtcccagctcggatcacgcaagtaccgccaaagcgggcgcgacgagcgcaaagccagcgattacggacgtagcaaggactcgagtgccagccgaacctaccgttccgccggcagatccacttgagccagcgcttggcgaggggccgccggccgagctgctcgtaccgatcggccctgcggttgctgccgaggttgagttgccgaggaagacgaggacggcctcgtaggcgccgagcgcaatggagccgtcggcagcaacctgctcgatgatctcctgcccggcagggacgccggcgaagtagctctgaatgaataggaggggggttgtcagctgtcggcaaaggaaagcccccaactgaagcttgatgcacctggccggcccagatcgcctccgaggcgttccggctctgaaccgaggtcgacgtcagacgcttcaggctcgacgggcgcagggcggccaaatcgaccgccagatcgttggctgcgcccgaattgagcacgacgagtcgcgccggaccctcaacgactggccgagagattgcgtcccagatggcaaagacggccagctcgggctggtctgcgagcgggtagtaggccagccgggtggcgttctcggctgcgttcggtccgagtgcctcggctaggaggagaaagccaacgaaggatggggtggcgcccttgggaccgtttctggtagagtcttttgggtagacgaagtcgtaccagctgtagccggcggtgtttgcctgcgaggccgactgaagggcgagtgtcgcgccctggtggctgtagagccgtgtgacattcagacttgcggtatagaggtaggtatcgacgagccaaagcgcttggccaaaggtgtcggtgacgttctgcttgccagagcacgagacggacgaaaactcgccaatgacaagctcggcgccgaccgacttggccgcggcaatttgtggcatccagaggtcgacgtaggcggtgatgctcgtgtggttgatgagcgtcgtcacgttctgaatgagagcgttgcgctcgggatcgcacgttgagtactggtacatatgctggctaaaagtcttgatcttgtggggcatcgcgctgtcgatgccggcgtctacgaggtcggcggtcgtgaagcgtgcggacgacgtagggtccatcgccatggcgccggcctgaaagaagggctgtgggagcgacagtgccgacgagatgttggcagcccaggcctgagcgtcctcaaaagcagcgcaaggtcattcacggcctgaaggcgatctagaggcaccgcatgagagcggcggggcgatggacctacgtcaaattgcgccgagtactctggtgcgtaccagtcgctcaggttgcgctgcgccgaggtaaactggtcgggctgaatgaggacgagaagctcagtcagcttgagcctctgtgaaggacggagtgatggcaggagcgcacctcgttgccgactgcagggaccacgcgcctgaagagtcagcgctcgaagcatggctcgaggcgtcaaggcgaccgcggagagacgtacactcaagcgcgtagagctggcttccgagctccttcaccgccgcttcagcctgggccgatgcgatttcgagcgagctattgccgaagttgaggcaggcgacaaactgggtcgaagccggtagcctcttgagcgcctcgaaccaggctgggccgtaggtcgtccggtagacgccgccagtgggcgagaggtcgagttcctcgacggaagcgagggacggatcgtacaagctcgaatcgctgaaagggatggagagtgatcagcaagtggcggcggcgtgaagattgacaggtggactgcgagacgcacacggtgatgccgcccggcctggtcagagggagaccgcatcctcgtcagcccaagcaggaggcagccgatcaaggaagcaggcatgcacctgatggcgatccctccggtccgattagcaatctcaccaaaaaggttgaggacgagcgtgttgggcgtctcggcgtccccgaggaactggtcgaggtacgccggctcgatggagaatgagatgaggcgctggtcgagcggctgcgaagcgttcgcaggcggaccagcgctcgagatgcccgggttcacgacggtctgagcgaaagcgaggcctggcaatgcgaggagcgaagggaggagggcgagcatgccgagcgacagggagcgacaaggaggtagagggtgctgcgtctgggcgcgatgaggagcagcttgccgaggcggcggcggcgtcgttcgctggcggcggtacgtcgttgccgacagcagagggtgatggtcagcagctggataagtcccgtccttctccctcttccgacccacctggtgccgtcgctttgtttagcacggcggcccgggctgaccgaagctcggaggcgctgcgcgcgcatccgccgctcttcgtcgagctgcggggacgggcttcgcttccctgacctccttttcactaccacctgctctcgcctttacttctcagaaaccctacccagcaccttttcctcagcatgcttctcaaggtcaaggtgcgtcttgatgagcctgcctccacggaaggcatgaccgctcgagcgctgctgacgctgaacgccctcgatcgccgtctctccctctcagactctcaccggcaaggaggtgggtcgccagagctctacagccccacttcgccttcgacttgctgacgactgctcgcctataccgctatagatcgagctcgacgtcgacgaggacgacaaggtccgtctcttcagcgagctctcggtcgtcctgccggccggccatcacgcgtgtcagcgcctgctgcaccgcgccagtcaaaggggggtctgccgccggatgctgacctcggcaatccctgccctcgatagatcatggacgtcaagaacaagatggaggagaaggagggaattccgccgacccagcagcggctcatctactctggcaaggcgatgtgcgtccctgcgagcgcgggcagtacgagcggctgagccctgctgtctactgacacgctctcggttcgtctcggttcgccatcaagggtcgacaccaacacgctcaagagctacggcatccagagcggcaacgtcatccacctagttcttgctgtgagtgccgaggcggccatctgtcgtgtggtctcccgaacgagggccgctgacccacgcatgttacggccctcctcctcgcagctccgcggcggccgtgcgtaaggcgacgcccgcatccgatgcttcgactgcgatcggccgctgctgctgccgacaatctcctcaagcaggaggtcggacgcttagatccgcgttggccgtgtcctcgctgccctctcctaacgaactaaagcgccactcgccctacccttctgctcccctcgtcacgactcgtgatgaccgatgtctctctcgcatgccaatgtctagctcggaagggtcgtcaagggtcataagtctcgttacgcagcccaccgcactcagccgaggcggctctttttgccgaccacccctctcccactgcccgaggcgccgacgctcgcaccgccgccgccgcctccgccagtactgcccggccggtagctccccggtcgagtcggtccgcctgttcctggcccggttggtggatagaccggcggcggtgggtttgtcggcggtgcaggcggagggatgctgcctcctcctgcggcgacgacagcagccgttcccgccggcgcaggatagaacgagccgggacgcgactgggggagaacttgctgctgtgcaagcgacgaaggcagcggcagcggagggtgcgactgctgcgacgtcagcgtcaggtcgtcgttcgtcacccgccggtcgggataggtcaggcgcgtgccctgaaaggcgctgcgagcagacgctgaagatatcagcacgcgttccgaagctaagagtgccgcagagcacgcacttgaggttgacgccctcgccttctcggaagaaggggctgtcgagcgcctcgcgggccgtgcaccgtcggctcgggtcgtactcgaacatgcgctcgagcagcgcaaagccctttggagagaaggacgggcccgactttgtcttgtaccagtgtgcgagggacgggtggaagctgggggttgggcgagcgaggagtcagcgatcggccactctcaaagcagtcggtaagacgcactgctcgaagcgcgcgagatgcgatgcctccgggtactggctgaggctcggccagcgctcctctagcggtgattcagagcaggtcagctcggctcgtcttgccttgcaagccaggacgcactgtcgatcgtcccgagcacctcgaggatgcgcagcatctggtctttctggaacggcagctgcttcttgttctcaatcttggcctcctcacccttgaagatgggtcggagcgagagcagctcggcgtagatgcaaccgacggcccagatgtctgacgcgccgctaggtcagtcagagcgcggacgactggcgcagaccgaggggacgtaccgacggcgcccgtgtagtgccggccaccgaggacgagctcgggcgagcggtaccagatggtgacgacgaccttgtcgccctgccagagcggctggagtggatcacgcccgaccctagcgaggccgagatcgccaatcttgacgcagccggcgctcgtgacgaggatgttggctggcttgaggtcgcgatggaggatatggtgggtgtggaggtagaggacgccgttgagcagctgccagagcagcgaccgcagcgtcgagggcgggaagggcagccggagcgactgcgaatggtgatggatgagctggaggaggtcgtgctcggcgtacgagaagaccatgaagatcgacttgtcctggaggatgacctcccggagtgaggcgacgttgacgtgagagagctcgcgattgatctaagagcaagagaagcatcaggggccgcatgaatttcgcgtctggcaaggacgagcacgcactgcgatctcccggatggccgactgcgagatgccggtataggtgacggcctcgccctccttgtcaggcttgaacttcttgattgcaaagagctcgccttccttgccgtccttgtcgcccggccgggtaggtcgggtcggatcgaacgtagtcgtcgacgctggccggagtcgggccttgtagacgcggccatacgtgccggacgagatgaagccgaggatgaaataggacgagaggacgggccgccgggcgctgtcgcacgacgaccggtaggcccgcatcggcgacggcgacctcggcggggccatgagccgcaagcaggcttcttctgctacagaggtgtgagtgcggcgtgaggcctgacctgcgaggtcgtatgggacaggcgagagagaagcggcagatgctggtcagaggcggagggagccgacgacggaccgagccgaactcgagtcggagttgcgcacccacctgcttcccttcgaccctcagccatcgacctttgcctcagttgatcattctcgcgagatgcctgcctcgccaacagcacgctcagcgctcctggccgcgacagaggtgcccgctcggacgtacagcgccgctgccgatgcccctcccggacctgcggccgacacctcgaacaccagcctcaaaggggccgctggcctccagcgtcaactctccgacgtcgagtgcccgcctccgctccctgaggaggccatggacgatccgatgtcgtgttcgccgccaggcgtcgtcgaaacgaaataccggccgttccgagaggtggccgcagtgtgcctcggcctctggacgagcgtcttctgtgcagccctctccggctcggtcactgcgaacctccagacggacatctcgtcctcttttaacgcaggacatctagcctcctggtacgttcctatgctagcccggaaagacgcctcccgtgcttccagggtcgtctgagggcctgatcaggcgtcgccgctctcgtcatcggcctcctccgacgcacgccgccgccgacagacgttgcgagggtccattgcgccatagctgaccgctcgatcctctggccctctctcgcaggctcggcggctcgtacctgctcggcaacgcagccatgaccccgctttggggccgactcgccgccattattggccgccggcaggccatcctcgcttcgatggctctcttctgcaccggcacggcaggctgtgcgctggcgccgaccatgggagccgttctcgcgagccgcttcatcagcgggtgcggcggcggcggcatgctgactgttacagcgatcatagtgggtggcgttttccgtcttgtcagttcagaaccgacattgctgacacgcctcgccgctgctaggtctctgatctggtctccctggccgagcgcggtctctaccaaggctacgtcaacctcctgttcggcgcgggtgcagccgcaggggcggtctttggtggtttcgtcggcgacaagcttggctggcggtgcgttcgtccgggctcgctgcgacctccaggacacatcgacgctaacggccgccctcacttcgctccgtagctgggctttcggcatgcaactcatcccgctctcgctctctcttacgctcatcatcgccaaggttcacgttcccgtcaagcctttgaccatgacgccctaccagctgctccgccggatcgattggctcggcttcgtctgcatcctgacgtcaatcaccgccctcatgctttcgctttcgctcgcgaccgcctccggctatgccttttcgcaccctttggtatggggcctgctcgcgctttttgcgctgtcgacggtccttttcgtcatcgttgagcatcgggcggccgagccactcgtcccgatgagcctgctcaagagctggacgccggcgctcgtcctcgtcgcctttctcctgctgacgatgtcgacctttgctcgggtaagtcctcgggcctgcagtctttcactcatttgctgaccttcaatccctcgcaccagctcttcatgatcccgctttatctccacgtcgtacgaggctacgacggaactcatacaggcctcatcctgcttccctcgaccttcaccggctcggccgcctccctctacgccggatggcacatgaagcgctggggcaagtacaagacgctcaccgtcgtctcatccgtcctgccgattctcgcagctgtctcgctcatcgccacctggggccttgacgtctcggtctcgcgtatggcaatcgagtgcgctctcgcaagctggggaggcgggtgcgttgtctcaatcattccggtcgcttgattgcgagctgatcttttgctcctcagggtgaccatcacgacgttcctgaccgccctgatcgccgcctgcccggccgagatgatgccgctcgccatctcgtcgtcgtacctctttcgctcgctcggccaggtcctcggcgtcgcccttaccggatcggtccagcagtgggcgctcacggcggatctctatgaccggctcgatggcgtcctcggcaaggacgtccttcgcagcatcgtcaccgagccaagcgtcgtccttcacaagctggaccccttcgttcgagccgaagcgatcgccgcgtagtgcgtctccttctctcggttatcctcctctctgtgcttctcgtctgaccctcatcctccctgttgcagcctctactcgatcgaagccgtcttcatgctcgcactcggcatcgccgtcgcaatgaccttgtgcggcctcggcatgcgctctttccctctaccgcgttgatgactgtcctcgcctgcatcccgttcccctttacatagatgtagacatgctcttccctcgactctcctcgcacaccgtcagaagtgcacatggacgcaagcgtacgagtcaggtcggcccggggtcccacgcgggctgactctcacgccggagccgacgcgtcggcggagaagggctgagaaacgactcgaccgcgacgcgggcctgactcctcctcgtcctccagctcctcctgaccaatctctgccatcttgaagcaggtgcgaagagccaggtgcgagcgacgcttcgcccgcccgccgtcctgacaaccctcgctgccttgcttgtgctcagagatcgaacgttctcgcctcgacaagctccgaccctcatcttgccttgcctgctcgccatgcccgaggtgagctcaccgtgctctcgagcacgcctcgacaaaagactgaccttcgttgcttgtcggaagctctgctccagggccgtctcgctcgaccacaaggagctccttcgacgcgacgggctcgaggagctcgcgagcgtctgcgtccgggcttctcgcgacgcctcctggcaagctctcaagacgccgcacgccctcggaccgctcgaccagaccaactcttcgttgatcccagtcgtcacgaccgtcgtctggccggccaatgccagcggagaggagctcctgtcctttgaccgactcgagaccggcctcgctcggctactcgacttctacccgcacctgaccggccgactggccatcgactcggacggcagggcttcgatcgaccggctcgggagcggcgccgagcttctccaggcacgggccaacagccgtctgagtgactgctctgggacgggtagcgatggtcgtctcgtccttcccgaccttccgcaggccggcaacctcacgctctcgccctggacaagtacaatcgagggcgtctgccaaggccctctcctgtcctttcagcacacctgcttcgcatgcggctcggtcgcactcggcgtccggctccttcacgtcacttccgacgcgtcgacgacctatcagatcctccgcgacctcgtcgagatcttgaatgccctcggcgacggtcggccggcccacgaaatcacgctgcccgaacttcagatcgagtcgttcatgtcggatctcacgaaggagggcatgtcggcggaggagcgtcaggccgcactcgccgagacgccgacgctcttcaagcactcgccgccgcccgagctcgtgcggccgaaggacgacgacgagatccccctcccgcacgtcgggcgcatcctgctctacacgcgcaaggagctggcgagcctcaagtcgcttgcgacgccgccagacagctcgggctgggtctcgaccttcagcgccctggccgcccacctctaccagagcatcttccgcgcccgcaccttgctctgggcgagagagggccgcgagggcgtcgtgagctcaacgctgcacgtccccgtcaacgtccgaagcgccctcaagctgcccgagcgctacgccgccaacgcgcctctcggcacgacgctcatcctcccgccggacgagctattcgaagcgccactctggaaggtcgcgatgagcgttcaggcccttactcgccagccggccgtttcaaacaaggccgagatcgaggccgctttgcgatgggctgtcgccgccggaccggcttcggccaagatgcactttgagctcggcgacggtcctctgctcgtgacggcgtggcagggcttcggcgcctaccctcatttgtgcctcggcggcgtccgaccgaccgtcgtcagtcagccgccgtcaccctacctccccgacggcatcgcctttctgagtgccaccccgcaaggcgagtttcccctccgcctcttgcctggactcaagagactaacctctgtcattgatcgtcaccgcagaggaggccgacgggtccgacccgggtggcgtcgaggcaaacgtcacccttgcggctccgctctgggacatcttgctcgccgacgagcgctttacggtgggtcgtctgcccctcttgcttgattcgtcccttactcaaacccaccgccatgctcgcaggaccccactcgccgatgagatgagatgcatgagtcaaagtacaagttgcaggggtgcaagggggcgatcagcgctcctggcggacccagctattggccgtcatgatgcggacggagtcaccgaccgcaagacggcctcgcgcttgggtcggcaccgcgttgacgccaaagcaagggtcgtacttggacaccgggtcggaccggcggtactttgaggtgaccttgtacggcgtcgagccgtgttggacgcccgtgtctggatcaatgttgggcagctgaagcgatgagtcagcggaagtgagaaggtctagcgaaggacgctctgggttcgcacctggcagcggccgcacatcgagacgatgacgagctcctccgatccaaccatcacgacaccgaatcggtcctccatccaggcctcaccgcccttgccgccgacctatggggaagggccaggagttaaaaggtgcatcaggaagggaggaggcgccgaaagactcacgacgagatttccgcgcgtgcgccgcaggtagtcgtcctcgccagcggcccacttgcgcttcgcctcgccctcgagcggcggtttgacggcccactgctcgtcaccgttggcagagaggacgactttgcgctcgacatcctgagccgaccaggtggtgactatcaggaacgggaagccgtcggcaaaggctgtccgggcatcgtcgggcaagggcgcagcgagcgcgtagacgtctgggttctccgcggcaggcgacgcgagcgcacggcgggagggacccttcatgacgagcttgacttcccggccgaggaacgtcgacaacgcttcgtggacgtgaggcgcatcgacgacgtaggcatcgaccgtgtcggaccatatcacgacgtcaagaagtagctcccagccggccagggcctcggccgtcggctcaagcgggacgtgcaggccgtcgatgcccgccgacgggatcgagagcttcaggaggctcttctcgtggtcgatggccgggtggacgaggaccatctgttggcagtgaggcttgttagttgtgccctgcttgctgacggagacgaccgagagggctgaccttgttgagctctcgcgccgtcacgaccttgtgcgtctcggaatcgatcagcgcccactggcggtcgtactgcgatggtcaaggttagccctgattcgacgagcgcgagatcaacgggagacgcacatcgaggccgagcgcagtgtagcccgactcctgcacctcgatcccgcggcagctctgagatgctccaagatcagtttcttgaccggcagaggctggttagagcgcttgatctgaccttcacaggatggacaaagatccgctcgaggacgaggtgctgcttgccgacgccggccttgaaagcttcgagctgccgcttgctctgggcgagctcgcggtcgcgcaggcggccgaggccgtagacgagcaagggcacgaaggcagcgagcgggaccaggataccgaaggggatgagctcaaggagatcacgaacagcttgcatcgcgctggacgtctcaggctgggatggtgcaaggggcgaagatggagggtcggccggtccacggccaagctcgcccggcgacgaggtctctctcacgcgcgcgccatgagttcgggcccatcacttcgcccctccgacgtctccctcgcccttcccagccttctccggacagtctgacagaagccacacgagcgcgcatctagtcgttgatatcggcgtcctcgcccgccatcagcgccttcagccgcgcgccgaggtgccactcctccaggctatcgattacgtcgccgagctgctcacccgagagaatcgacggcaagttgttgagcgtcacgggcacccggtggtccgtcacccggtcctggcagaggacgactgtcagtcaaaggtcgcccaggcaagaaaggcaggcagggacggacctgcggctcgttccacgtccggatcttgtcggcccggtccatgcctgggatctgcgaggccctcaccacacgattttcctcctcgatgagcttggcccgatgcgcgtgaatcttgccgcggaggatcgtccaggccgtctcgcggttctaaggcggggcccaagcaggggttaggcaggcactcgtcttgcaggctggaaggagcacgctcgcgacgcacgccatgctgcgaacgaccctcctggcacttgacgtcgatgccggtcggcatgtgcgtcaggcggacggccgattcggtcttgttgacgtgctggccgcccgcgccggacgagcgcatgaactccatcttaacctccttctcgtcaacgtacgacaggtcgtcctttgtcgggttctcgtcaatcggaaggacctaagcggggaggattatgtcgctcagcacagcacacggtggaaagcgcaagcgactggacagacaatgacggccatcgtgctcgtgtgcgtccggcctttgctctcggtcagcggcacgcgctggacgcgatggaccccagcctcccatttcagccggccgtaggcgccatcgccctcgacgcgaatcgtgcagtccttgagcccgtcagcgccggccgtatcgctcgcgctcgtcgactcgaggatcgagcacttccagcggttgttggtcgcaaagcggatgagcatgtcgcggatctcgcgcgtaaagatggcagcctcggacccgccctggccggccttgagctcgaggatgcacgacaaatgggacgaggtcgacggcgggaggaggtgcgccggcagcgtcgtcgacaagagccggttgatctgctgctgaagctcggcaacctcctcggccgccatggcccgcaaggactcgtctgggtcttccagcagcggcagcgactcgtccaaggcctgcccgagggtcaagatcagtcacagcgcatggccaggaggagcaagctacgggcaaacgcacctcttgcaagccgacgtattccgtccagctcgcgtgcagcggttcgagtgctttgagccgctggccgcgtttccggccgccaacagcgtcggacgggtcaaggcccatctggcgccgacgcagctcgtcagcagttgctggaatgagcacacgcaagcagctgaggcggccgcacctcgtccagcagccgggtgcgctccttcattcggacgcgcgcggtcgcgacgacctggccaaactgctgtggagggacggcgagcgcccggcgccaggctgaggcatggaaggcccggcgcgaggcgatgagacaggtcatcggccggtggaggcagctactccgaggcagctgctggcgaaggcatgacgagaggagggcggagggaagcattgtggccgtcggaggtcggaggcgtgggctaggcaggcgcctgagacggtggaccgagcgattcaggtaatcacagtcgagttatcatgatcccgccggggtcgaggcgaattgatgacctgaatctcgcattgcccgcggctcaatccagcgcagctcagcagcctagtcgagcagagcgcctctctgctctcacctgcgaacggggaggacggagagttacttcggatcgtcgctggactgctggccgtgggcaggcggatccatgacgaggcccccggaggctggaaatcggaaggaagggctctgttaggtcgaatgacacctgcctcaccgagcgaagacggtttcgggagtcggggcgcgcgcgcgcagtcgccggcatggccgagagcgggcgggaggagtgagaggggcgggcagcctcgcccttgttcgctcgtctgctcgctcgctcttcgcccgaccaccaccactatcgccatgtcgtctgccgtctcgagctcgcaagtctcgcccgccctcggccaccggcgtcgcatgtccaagcctcagggccagccggctgctcctccgccgctgtcgcccgcagagagcggcgacagctccgacctctcgctcgacgtcgaccccggcgacggcgacgagcccgacgatggcctctcgtttgagctcgacccgacctttcagcgcgagccgacgtccgacgtccgcatcatttgcggccggcataccttctggtccgtctcctccctcttgcgagcaaagtcgccgatcgtcggccgcagctgacgtcttcttggcggtccgctgctgcagggcgcacggcgctttccttcgcttctcgtccgactggttcgcgagcatcatcgagggcgactgggccgagtcgcagccctcggccgacaccgactcggtcgtcttccagctgcctcccggtccgacgccgtcgtcgccaccgacctcgccgtcaccgacagacgccgacgtctcggggctccagctcagttcgccggctgcctcgacctcaagtccgaccggctcgccgcaccagacgacgcgcgactgggcacgcaaggcgagcgaggagactttcatccagttgccgcaggacgagatccgggtgcgtcgtggcatcggccggagctacattaccgtcaccctgccctcgtctgaagctgcgccgttgcacgactaccgtccgtccccgcctttaattgcctgaaccccaaccgaacgacatcctgacgtgcatctctttctcgcccagtgcaccacgtctatccacacctcacactccgagtgacgtggctgacggtcgagccgctcgtccatttcgcgaccaaggtgcgtctgagctcagccgcggcgcgcgcgccccgccggtcggcccgcccgccggtgtcgcgcgcgcgccccacggtctccctttttttgtgtggtcaggcttcgcatgccaaataaggactgaaacaaccctattactctcttccctgccctcgtcggtctgctcccgccctcggctcctcgtcggccgtctctgtcgtcccgtcgtccaccgcttcgcagtatcaaatcccgagtctcctgcccatcctcacgatcttcctcacgacccatgctcccggccggccgatcgccgcgctcgctctcgccgaaacactcgccctgcccgacctctaccaggaggcttcgcgctacgtgctcgaccagctgccaaactggcccgagaacgagtacatgatcctcggcggcgagacgcgctggaagctcgaaaagcgtcgaggctactttctcgaccgggtcctcaagatgggcctcgtcgaggtcgagaaggactacatctgcgtgcgtcctcccagtcgttcgaggattgttgccaggcggcctccgaccttgccgagattgacgctgtgctccacctctcgcccgctgcctccgctgtctttctctcgtcctcctgtccggacctgcttcacagcacgcatcgtgtccgcacccgtcccagtgtgcccatcagctcgacgaaaagttccgggcagcatacgccgcgagcttccgctacggcgcccctcaacctgtgcgtcgtcgcagctcccttgaccttgtcaccgagacccgtcctgaccctcctcccatgccacctcgcgcccccgcctctcagtcggtcatcttccgcaacctgcgctgcctcagcttgccgccgtccttcttcatcctgccgcagacgctctgcaacgagacggcgaagtcgtggctcgccaaccgtgcgttctcctctcttaccgccaggtcttcagcttcctgaccagcagcccgtttcataccagtcttcgaccgaatgtttgagatcccgctgcatgcgaccgagggaagcagaggacgcttctttttgacgatcaagctcgcgagcgactgagcggccctgctggctcgctaccttcctaactccgccctaatccatgacacccctttacgaccctttgggcgagcgccgtgggatcgaaagtcggatcataccagtacaagagagtgaccaccgcggacgagaggggtgggaaggaagcgggcgagaaggaaggggcagagtcttgcccggacaagggagcacggacgctcagaggttggcgccggcctcggcatctagtgcctctagtctcccgatttgcctgggaaggaggaacaggacgtcagaccaccctgtcggcacgcgcgtggagctcgcgaggagggacagacttgtcgcgaatcgcctcctgccaacgcatgagcttgccaatctcgttgacctggaagccaaagatctttggccgatagcgctcaaccttcgccgccgccgaggccgtgctgacgctgccaaccgtcgagcctgccgcgccggacgctgtgggcgcgtatgatggcgggagggctgacgacgacggattggagggcgagtgctgctgaggcggcggcgtcttggttggcagcatgtgcgggtagaccatgaacagcatgtgagggaaggctgaggtcgaggagggaagcagattgtcagctcaaagcagtgcgcgcatacaaccacacgctcctgcgagaacgcactcgtgccaaagtaggcgccgtcgatcgagccgtgcctgttcgattttggcgagtagatgtcctcgcagcgcgggcagtacagcttgaccgccttctggtaaggcgagtccgagaggccgaccggcaggagcggttgcgagtagcagaagacgcgcgggcagcggccaaagtcggccttcttgtacttctccatctgccagaggcgagcagcagcaacgaggtcagcagagaccgcctggagggcaggtgaatggacagagggggcagcgcaccatcttggccaggccgcgtgaggtcaggatgtagcgcgcatgaatgaggccgtagagaaagcgcgccgacgtctcgatcgactcgcgcacgtcgtcgtcgaggtcctcctcggctgtgtgggcaaaagagaggtcacaaggaggagccaagggcgagctaggagggtcagctcagtcgtccgtcgaaggtcggaggcgctggtcggaggcggtggtcggaggcggtaagagcggcagggctgggcaactgccggatcggcggtgctggtgccgcgcccgttcccatccctcgagaacgcccagacgtcggactcttgaaagcagcagactgcccgagggcacacatccggccattctgcccgcccgcagagaagccaagccagagcacgccagcgaccccgagcccgacatcgacagcgggcaagagcgagcgcgagaaggaggccgactcaccgagcgagtcggtgatgagctcgagtgcccggccgtactcttgcgggacctcggcgttgaggcccgtcaggttgaagcggtcgaggatgtattcttcatcgacctcggaaaagtactcgttgcccttggtcgagaggaaccaggtgatccagctgggtcgtcaagagaggaggccgagccatgggtcagctttgcgacgagctgcgacgcgagcttggctcatgccgcgcctccgccaacgcctttcgagacgcacgagtttgagtagtcggattctgagccggtcgagaggtcgtccatgcctgcaggtcttctagccctctgctcggtcgtgctgtcctgaaagggaggagaggaggatgaggcgagagcaggccggttcggcggtcgacggccctttcccccggcgcgcgcgcgcgtctccagtttggctggcgttcgctcgtcgcctcgacctcgtatggttcttccctcatcgaccatctcagacccagaccgcttcaacaaacagcgatcctcgacggcagggcacgggacacgagctaacgacggtccatggtccatccactcagcggctgtctcccgacttactcgcgcttacttggcaaaggcgcgactctgccgttgcactgccctcgacgcgcttactggctaacagcagcagcgcaacgccaccccgcacggcggtccctggtcttgtctccttcgggctctgttttcgagggccgaggcacagagagacgccccttttcgccgtcgacgaaccaggaagctgtcggaagacttggcaaaagcggaagctgccgccggcctcgcgccctttcatcgccgagcccgcagagggcctggcctgccagccatcccactctcggaacgccttcgccagctgtgtacccttggccctctgttgctagcagctaacctcgcccatcacactgcctgctcgcccgaccgaacccgacccgggtcctgagctctcacgtctctctctctcgcccgctgaaaacggacgggacacattgcggatccacttacccccccgcaaacccttcaaaaggcgacggtcgtctgccctcctggcccttcttctctctctccacctcctctctcacacaatccttctgcccttccttcgctctcccactctcactctctcataccctcacctccctcgccatgctctcctcgcccttcttcctcctcgcctcggccgcctcggtcgtcctccccttcctcgccccggtcgaggcctcctgcgcgcacggcattgccggcatccacgcctttgagcgccgggccgacacggacgagcacgtcctgcgcgcgcccaagtttggctacgacatcgaggacggcccgctcaactggcatgcgctcgccccggagaacgccatgtgcgctgagggcaccaacgtttgtcctcctcctttgccggccggaccttctcatcgactagaggcctgtcgactgacctgcctttctctgcctctcagcaatcgcccatcatcgtccggaccgagagccaccgtgtcagcgacaagggctcggtcaagctctcgatgccgtccaaccagaccgacgtcgtcctcaacaacctcggcacgaccagtgagtctgcttcgtcgtcggtcgtctgctcaatcgactggcttctttgctgacatcctcgccgcggccatcagtcgagttcctgctcgacggccagctgtgggccgacaaccgtacattcaacgccgttaacgtccacttccacactccttccgagcaccggatcgacctcgcccaccacgaggccgagatgcacatggtcttccagtcgcctgatggtcagcacccaaactttcaagctgctattcgcaaccctcctgaccggcccctatcccgcctgcttgcagacaagtccattgccgtcctggccttcctcatcgacgtcgccgcctttgactcggacccggcgctcgagcgtgtgctcgcctacctgccggccgtccaggcgcccctgacgacatacaagatccccaaggtcgacatggccgactttatcgccgccgccgaggaccaggactactagtgcgcactcttctcaatccccctaatctttatacctctcgctgactcgcccttctcgtcgttcaccttttccagcatctacagcggatcattcactactcccccatgcacggaggggattctcttccacgttgccacgaagcgttcgccctctttcacacctccttagcctcagccacccctaagctaacccactcgtccttctgaccttcctcagccatcaagctccgcgcccagacgttcatcggcctcaagaagctgaccaaggttcgtcttctgttgcaccctccttcgacgacgaaccagccactgatcttcttcgccttccatcgcgctccagaccaacgcacgcaacagccaggcccagcccggccacgtctcggtcctctcgtcgatggccaagtcggtcaccgcacttgaggctgccatggccgtccaggctgcgctcgtcgaggtccgtcttagcctcctccctccctgcgctccgcttaatagctgcagcagctgacaattccctcgtctctcgcctcctcaggcccctcagaagcaggagcgccggtccgcccacttctagtccctccttgtctctctcttctcattcacttgctttctagtcactccttcccctgctcttagtgcttaaacctcatccacgcgctgcagccgctgttccgttcttgtacctcttgtttttttttgggctcgctctcactctccctttacctatgcatggccaattgtttacctctctgctggtcgtcaggagggccaattcccaccagccgcttctagcaagacataatgatcgagagctagtatacaacaggaggcttgggcacaagatgggggagaacgaggaggctgacaagtttacaaaggagaaggacaagcgggggcggtcagatgactagcggggcagccgcaggcgccgaccgaccgaccctctgtcggccgaagcccagcagtctatcgcgcgcctgctgcagccttgaagctcggccggccgtttggtcgtccccgaaggctgcgtcgtctgcgtcggcctcggccgccatcgtcgaaccgggcagcatccgctcgagctcggcctcatcctcctgctcgcgagcctcgaccgctccaggcggctgacggcgaccgacaacatgtcgccgccaccagtagacgaccgtcttctcccagcggccgacggcctttggcggctttggcccggcaaatgtctcaaagacggcgctgcccggcaagctgaaccacaggtagacggcggcccagacgagggcgacggccgagctaaagacgacgagcttgacgttggggtcgcgaaagaaccacggcgtccagaactcgccctcggtcggcccggcgccgtttcggaagatcgggctctggccgcccgagaggatgccgacagtcatcttgccgtggccgtcgccgttgacgagtgatgtgaggttacgtctctttttatcgtcgtggtcgtcgtcgtcgtccgtgtcaccccggatgagagcgacagagaggaaccagcagccgccgaggaggtagagaaggacgttgacaaccgggaggccgagccgaccgacgacaagcgcccgatgccgatttgtagccttccagaaaggcgtccgacttgagggcagaggtaggaggtctagagaaacgcaagtggcaagtcagtacgatgaccgtcggcgggttgcggccctggccggcgcgactggacgcacggtggataggcaggacgacgatcgtaaagaccggcgcggtaatgaggacgagcgtcggcgtgaggatgcgctggaagacgcgaaacatctgcaccttgatgtgcacccgagagatcttgaggacgctctcgacgaggaagttgacggagccggcgaggacgacggccgcgagcccgatcgcgacgaggagaggcacgagccggaacggccgcttgggcgacttgtagcgcggtggtgggccaactgaccgccatggtgctgggtcggtcggggcggacgacagatgagccgctggaggaaacgagggagaccgataggatggggccgactcggacggaggtcggtaggtcggggcggccggctgcgacgcagaagacagcggccagggagatcctgctgtcgacaccgagaccggccgaccggtaaagacggctggcgtgtcttccttgagaatcatgcggcctgattgagaagggccgcgggtccagagggagtccgaggctcaggacgcagctggaagagcaagggccggcagtggatgggagttgtggcgcttcgtgcctcctggccttcgaacagcctagccgcgagagtgaaggagattcaacaactcgagcagcacctgcgtgacgccaagatggagcaggaactgagagctggtttccgagaggcgagaagcaggcggtacggatggcgtgagcaagaacgtcctgtcgttcggaggaacgaccgaagggccgctcgcgccgcgcagcagcgtcagcggcggcagaccgactctgcagacctgccggccgtcctctgggtggcgtctccagagtcggaacgaacagcggtggcgagctcctaggctgcaggcagtcaggaagacgatgtcaaggagcatgggtgtctaccggctgagggagacacatcatgcggcatcggcgagacctgcccgcgtgaaggctctgccctcagcccgcgacgactccgccaacgctcgccatctccctctaaccctcgaccacgtcccaaccaccacagaccatcagcaagctcatcgcgcactcctcgcgcatgcgacccaagccagtaggcgtccctcgcgcggcttacctggccccggccaagcatcgggctccggccgggcggaacgtcctcgcttcgccggcccgagccgactcttctggcgagccaccttacctcccgggcgacttcttcacctcggccgcacctatcccaccgacaccctcgacggcgcccggctcatcgacgcagagaagccgcttcaatctatccgctctctgggatgctgcaggccggtcggcaacgactcccagcgcgcccagcgcgagctcgccccggcttggaggtcgggaagagctcggccagcggacgttcttcacgccgacctttgatgacgacagctggcgccagccgatgagcaggtcagcgtcggcgccagatgtgccggaaacgctctcgaagccgacattggcggttccaggcacatctcgtccagcgcgtccgtcgccaccgccaggcgtcaggtcgagcggcggcggccgcagctggcccagcgtggcctcgagtggacctgccgacgcagtccttcactccctcgcgcctgctggtgcgacgattgaaggttccggtagcccggctagagctagcacgcaccggtccttctcgcccacgctcacttcaccaggctcgggaggccggcggcgaccgcctcaacccgagtcatcgccgggcgagtcagaggcggacgacgagccgccaagtgccgtcctctcggacgcagcctggcatgggcgactttctgccgtcatcgcgcacctacacggcacgctcccgcgcttttttccagacccgccgcactttccaccggctgtcttctcgccagccatcacgctcgtcctccctgcgccaccgtccctgcctctcctcggtagcagcagcagcaacgacccgagtggcggccctggtggtgtcgagcgtgcacccgaggtccacctccgaggcacccgcgcctacagcctcttctttgcagcggcccgggcaagcctcggcatcgtcttgcgagacccctacgtccggatcgagagcgtccgcgtcgtcccagcgaccgaaaaggagggcttcgtcgtctttccgaaccagttgccgccatcggcgactggtgcctcatcacgccctcaggacggcgcctcatctatgggcggcgccgagccgacgttcggctcttcgtccaaagtgccccatgcaggcctctcggcaggcagcgcgccggccgtccagatctcgcgcgcacgactcgacagggtcgttcgcgtgcgggtcaaggtgggcggtcggctccggttgccctcgctcggaccggcatcggccgtggtcgaagcgctcggcggacgcgtagcgaccaacggaggcgacccgagcgaacgcgagtggaccatcagtcagttttttcttccattcgcagacaatgcttcagcctgacttatgctttgcgttcttcgccaggcaacctctatggcctctcgccactctccgctcgcatcacccggcacacggtcgagtcggtctacccccttccgggcgaaggcgctcaggcctggctgtccggtcagctcgccgcctcacctgcagcagccggcggcggcggcgagagcggtggaagcggccaccagcagggaggctgtgcgggtgctgtcgagattgacctcgacgagttgcgggacgcacccttctggcgcgagacgaaggacgatgccgtcctcgatggccgccgagacggcgcacctggtcagacgggctgaggagcgggttcgaaaacggcctgctgccctcatcactctcatctcatgtcgttatccaaatttcgttgaaggggcgtcgtgtcgtgtcagccggcggaactcgcgagagaagccaacgcgcgtcgtcatgcgcccgccgcgctctcggcagagggccgccgactctcccagagccgactcttccatcagaccaccaccaccacccaccacaccatcgcccacctttaagtttactactgtcaactttccaatgctccagctccccctcctcggagcccgcgccgtccaggcaggctcgtcacgggcgtttgtgacgctgccgaccttggcctcaaccgcccgatccaacctcgtccgccacctccagcagccccgcttccggccaacctcgacctcgtcgctcgccggccggcgcttcgtctcgtccggctggtcgcaggctcctcgggcttccgagtttgaggcggccggcgggtggaagaaggtcggcacggttgcggccgtctttggtggcgccggtacgtcccccacacccttcgtcgacgagggatcgccccgagctgacctctctctctcgctcctctagtcgtcgcctcaaacatgttcctcaatcgggagacgcgcgatgccctcgcacccttcgagaggtcgtatttgaactccacctttgcctactcgtccgtccaccgcccgctttgagcttgccgagctactcagactgacctcaacctctttcaccggcttccagcggtctcggcctcgccatgaccggcggcatggcctacgccctccatcagtcgagcctgatgagccgcgtcatgtcggccaacccttgggtcatcctggcgattggcgtcggcggcggtttcgcgtcgatctacggcgtccgggcgaccgaccccaataaccatgttcagaagatggcattctttaccctcttccaggccagccagtccatcgcgctcgctcctctcttcttcctctcgcctgccctgctcgctcgggctggcctttacacgatgggcaccgtcggctcaatcgcctacgtcggcgcgacggccaagaccgacaagtacctctaccttggcggcccgctccttgccggccttgccgtcgttgctctctcgtcgctcgctccgatggtaagtctttgtcggtggtccctcgctggagaccggctggggggggagggaaggttggagaagagaggggacagctggaaggtcctctgtaatcttaccttcacagtgcgctgacttgccatttctctacaggtcctccctcggacggcccttcgcacgcttgccgtcaccgaggccatctcactttacggcggtctcgctgtcttctcgggcatgctcctctacgacacccagaaggtccttgcccacgctcgcatggtggccgagggccgcatgaagtcggatccggtgggcgaatcgatcagcatcgagctcgacacgctcaacctgtttgtgcgaatcgtgcaggtgctcgctatgcagcagggtggcaaccggcgtcgctgaatgcttgatttatgtcatcttttgttccgtgagaaatgtaagaaagtcgtgaagagtcagggagtggaatggcttgcacgcgcggcgcaggaggtctcgccgcgcgggtgtgctaacgcgctctccgcctcgacatccaccagcgccggtcgacccttcttctctccgtctctctcttgctctctccgctaggcgatgagcaagctcagcaacaaacgtggacggccctcgctcggcccttctcctccagcctcaaagcgggccaacacagcggccgctcgctccggctcgagctcctcctccgcgtcgcccgtcgcctcaagctcgaccgccgtcgctcgtcggccaaacggcgccggccacagctctctgagcgaggtagacgccgacctgcctgggccagcaactgtgagaggcggcgcgactccttcgacgccgacgtggatggctttgggctgacccagctgggtgcggtcgggcgggtttccttgcagcagcgcgccagcctctcggcttacgaccaggcggccatcctcgtcccgcggacgatccgcaacatctggagcttcttccaagccaacccggtgccgaaacctgcgctggaacggtcctcgcagagcagtaggaagaaacgacggacgagtcgcgagcaagagcagccgccgcccgagatgagctcattggagcgctcgacccgaccgctgccctctcctcttccgtcaccagcccctcggcgggctccctttgagccgatgccgccaccaccagcagcgtcctcggactggcgagcgagcctcgcccagacgtatgccgcctcgatcccgctgccgccgtcaccacctcgcgcgcgcgaatggctcccctcggccggcggctcgtcgtcggcggcttcggcctcgcgcatgcgcaacggcgctgcccagccgagcccgcaagcacgcgctcaggctgtgctgcatacgcccttgcgagcgacgagcgcgcgcatctcgaagccgacgctcggttcggctacccggtcaaaggccggcagcccggctggagagcttccgctgcgtgcgggtggctccgacggcaagacggccaaggagcgattgcgcatcatccgggcgaaaggcttcctcctcgagcaggctcagctcaggttcaagcagaagcaggagcaggagcgcaagcggatcggtcatggttcgttcagcctcgagagctctgcatggcggcaggctgtctgacccagctgccccttgctcctctcgcgcagtcattcgggccgacctgggtgtcgacaaggcctcgtttgcagatctcgcgcaggctctcgcccgatgtgcgtcggtagatctggatgctggaccgggcttcgcgctgaataacgcttcacccgcttttcagtcgactctgatcgcgagcggaccgccgacagcaagggctcgctgctaagggacatccaggccgcaggcaagcccgttcagggccgtcccgaggactgggtcgctcggctcaccctgacggaaaccaaggcaaagtcagcgtgagtcattgcttttccttgtgggccaagctaagctgcgctgaccggcgtatcctccctctcaggcggcgtccgccaaaacctgcccatctgccgtcgtacgagaagctcttgggcgaggatgaggcgcgggacgagaagatcgccgagcgcatcgcatcgctccaggtggagagggtgcgtgtcaccgctcgagcacaacgggaacgcgcgcactgacacgctcttgagcacccgcagcttcccgacgacctgacgcccgagcagaatcaggaggtgcgggccagcctgaccagcgaagccaactctaggtcgctgacttccgccgctcgcgcgctccaggtccagcgactcctggccgacacctcacgcgtcaaccggtgtcagagtgccgaggtcaagcggcacgacctcgtgcttctcaagccgcggacgtggctcaacgacgaggtcatgaacttctactgcgcgatgattgtcgaggcctgcaatgcccgcctcaagctcgccgacgtctggggtgagcagcagggcctcaacccgctcaaggctcgccgccagtgggtcgggcctaagggcgagcttgcgatggacgtccacgccttttcgaccttcttcttttccaagctcgaggatccgaacgccggctacgccaagggccgtctcaaccgctggacaaagaaggtcgacatcttcaagaaggacctcatcctcgtcccgatcaaccagggcaacgcgcactggacgtgcgccgtcatcaacttccgcttcaagcgcatcgaggcgtacgactcgatgggtcggcctggaggcgctcgcttcgtcttcagggtgcgtgcagattggcgtgcagaacggcgccctgcgctgacgtgcgtctcccgtttctccgtaggccttgcgcgactatttgcagctcgaaagccaggacaagaagaaggccgactttgactttgacggctgggaagactactcagaccatgagatcacggtgcgtcgctccctcctttctggcaaactcgggccgctgctgacgtcgtccctcttggcacctgtgcagccccagcagttgaatggctacgattgcggcgtcttttcctgccactttctcgaggccgtctcgatcggtggcggcgccggcacctggtcgttcggccaagagagtgcgtcaaagacgggtgcggccgattcgatctcgctgatctcattctctctttgcctcagacatgccctaccttcgcaagcggatgatgctcgagatcggccgggccaagctgctcaaccatcccgactcgaaatcttgagctcgtcgagctttgatcgagccccgccaacattacttttggatatcagacgtcgacgcgcccaaccaacagccggcgactctccttcccccgttggcttgggatggcgcctccgtcagccgcggatctccagaacggtccactcttgctccgatcggggaaagactcagcggcggcatcgcgctctgaggatcctgagttgtgcgccgctgtttccagcccgacacgacgtcgtcaccaaccgatctgatgcagcgcgtcttgcggacgtcaatagagttgatacagaggggagttcgttaaggacgacaggttgcgtgcaacagaagatagggcggggacaaggacgcgaacatctgcagcgagtgaactcgaggaggcagcaaggaagaaaagtgcggaggagatggcgtgtgtgtgtgtgtttgtgaggtaggacgatgagggcagatttggagagccgaggggcggcgactccctttcaacgtcaacgggccgacgtgctgccggcggtgccgatcgacgacgacccgagcgagccgtggctgatggtctcaaccgtccaaatcttctttgcgccgccgctgctgctcgagttgcgcttgagcggaacggctttgccactctcgccgcctgccggctgcgcaggagagccgctcgctgcgggcgtcgagacggtcgaggacgccgccgccgtcatcgccgtcgcagctggagcagcagcagtccgtacagccgcggttaccggggccgccagctgcggcgcttggcttgccttgaggcgcttgatctggtcgtcgaccatcttgagcccgttgcccgtccggtggagcatgccctcgagccactctttgccgacgagcaggtcagcccgccactgctcaagctcggcagcgcccatcgacgcgttcggctgcggctgagaaaggtgcgcgaggtgggccggagtcgagccgggggcggccgaggaaggaccggcccgctgctgctgcgactggggttggaggaggctcgccgggggcggcagccgaccgtacgggccggccgagcctgcctcctgcgcgccgctaccgttgctcgtcgtcgcaaagggggcgccgcctcgcatctgctggagacggtgctgatggccaccgtagggcccaccgttcgcaccagcgtcccagtagccgcccggcgggccgtaagtctgctggccgcccatcagcggcggcagctcaaagccggccttgccgttccgctgggcgtcagcgagcgcctgctgatgctgagcgtgggcagcagcgtgcgggctgccaaacggaccgccaaaagccgacgagccaaggccaggaagctgctggtggcttccgctggcctgctggtgctgctgctgctggccgggcggaggccggctcctcggactctgcgcctcgctcccgctctgactctctccatcgcccatctcgtccgtctcggcgcccgagacctcggccgaatggagagcggcgctcttgcgcttgcgcccgcgaccgctgacgagatgacctggcagcggcagcgggtgctgctgctggccagagccagacgcgcccgagttgccggcgctgtagggctgggacgactgcgagcgcgagaccgagatgagggcctcggcggcgtcctgctgcatcgagtcatcgtctttagcctggaaaagacgaaaacgaggtcgctggagtcaggacaaaatcgacgccacaaagatgctagctagacgcaccggcccctcgttcttgatggcctgctgatgctgctgcgccgcctgctgggcttgcatcgccgccgcttgcgtcgcggccggcacacgcttgcggcgcttgataaccgtcttcttcatcgtgactggcctcggctggccgtgaagcttgaagtagagtcctgcgagcgcgcggggaagagtttcagtcctgcgaagcccacactaaagacaaggagacgcaccacaggcgttgcaggttgtgttgccctcggcgtcccgccgccagagtggcgtcgtgctcgtgccgcagttgatgcagctgatgccgccctggctggccgccgtcgcgcccgccgtgccggggacgccatgcccgctcgagccgttgcgatcgatgccggatccgcagccgccgccagagttgttgagcgccgggcagccaccgcaggacgacctgccgccagtgccgttgcagtggccgtcgcccgggcaagttccggccgacggcggaggcgtccgcactcgctgctggacgagcggcggaggaggtgcagcgacgggagggagtggcggcgtagcgggagcggccagtgcagcagctgctggcgctgttgggtagagagcgccggcagagacgtttacgagcgtagggtccaggatgacgggcggcgcagagggagagaccgaggccgaggcaggcggcgtcggagccaccgcaacgaccggagccggattcgcgaagagcctgccatagtccctgtggacgccgctgccagaagcttgctgctgttgctggtgatgctgctgctgaggcgttgggggcagcgggccggccgggatcgccaggtttggctgctggaggccgggcaaaggcgaccgtcgaggctgcgctgcgagaatgggcctctcgtacgtgacatactcgggcgacggctgccgtctggcctcaggagccgggctgacatgcgatggcgagtgggacgtcgaggcgttggccgagcctaggtcgtgcggaagggacagcggatggtcagcctgtgcgtccagttaagcggacaacgtctcgctacagccgagtgaatcgtcgcggaaggcaagatggtggtggcgacactcgttcgacgggagagacgataagatgagatagcccgcgctggtcccctccgggcatgcagagcccagcgcgacagccgagttacttttcgagggagccgcctttggcagcgatgccgcgtgcgcatagagggagaggcgggagggtaggcttgaagggtgacgaggaggcggagaagaggtccgtgaaccttctcaggtcaggaggcgaacccgaggtgggcttcgagcccgccgccggccggcctgacggtcgtccgaccgcccaggacgggcaaccactgcagctcggcctgcgctgctcgacgttggctcgtgatgtcacgaacgacgccaggtggatgcctgctgagtagacggcgggagagcggccgctgacccagccagcgggtgaggagggtccagcgagcgccgctgacctgccaagcgaggttgggcggcacgagcgcttcggctgggtatcgccgccggccgccccagcgagcgggagggagcgcatcttgggctccgaagcacgagggaagggagggaaaggactcacgaccattcggctggccgtcgagctcgtggaaggcgctcgcgtaggggcttccctctgggatctggtaccggtggccgccgccgctgctgctgctgctgctgctggcgccctgcgctggcgttggcgctgctgctgacgctgccgaggttggtccgaccgacgccgctgctgccgctgtcgtcgtcgtcgtcatcgagacgggttctgacgagactgcttcagccatcttgctgtgaagaaagaggactttgaaggaaggaagggaggagaaggaggagaaggagggtcgcggtcgcgagggagattcgctcttgcgcccgctctgattcgccacagcgacgggcccacgccgggcgctccgagcttgccagccagaccttcagcccttgtttcttcccgagcatgatcaaaccgcccggcctgtcccacgacggatcgaatgagcgagctgcatgcgagcacgccctcgctagcgacctgctgcccgtcttacttgatcggaccgacggtggacgagccatcgggagccggccacctgcgacgtgatatcgcaatctccctgcgaagagggccgagccatcgcgagcccaccgcgctcgtcgcccatgtgcgcgtccgagctcgtctcctgcttgccttccagcctacaggccctgctgtcgctggacgaagcgatccgctctcccgaagtagacccagcaaaaagggtcgtgctgcgcccctgctgactgagggccagtcggtcgccgccgcaaagatccacgtccagcaggcgacttgccgccgcacttttctcggccgggtaaaacggccgagggggagctcgctcgatcgctcaaggctttcatcgccaaaagaaaaagaggaggagcggccgcgtcgtgcggggagctccccttccctctgctgacctcttcagcttcgtcggtcggttggagcgacaacatggatcctcaaagagaggcggcgctcacatctcccagtcgtcgtcgatgccgcctttgccgtcgccggcctgggcgcggtacatgcgcgcgaacctgccgcgacgggaggacgcgtcagcggccaacgcccggcgcagtggcgaaccgagacgcaggaaacgcactcgtcgctgctcgtcgcctgctcgatgcccttgtcttcgcgcaccttcatgaacctgtccatcccacgccggcggccggtcagaaaaacatatcagttggaggccgcgcagcagctaagggggcaggcgtacctcggaaaccgcaggctcatgccacgctcgccgccgagggaggacctgccggccgggtagactggcgagagagtgatgctgcagtacggaacgatcgcttaagatcagtgaatgccaaaggtcgataggcaagcccagacgcactcggcgccgcgaatctcccagacctcggtaggcgaccaccagacgtcgggtatccggcctgcaagacggaagccctgggcgtcagcctgagtcgagctgtcgactgcaaccaagcttctgtcgcgcaccgttcgtctcgatccctggcggcacgggcgcaccctttgcccaccagcaggcgtccggcttcatcttggggtcgtacttctcccggttggccttgtagaaggcgtccgagaagccgctggaagagattagaacgctcgtcaggtatgtatcaagttctggctctgattgagtgctcgacgcacctgatgcacttacagagcgcctcgagctcgccgctgtcagggttgtactgcaggtccgcgccgagaggttggtcagcactcgagccgctcgagcctgagcaggtcacaactcacgcaagccagaagaatcgggctccaccagccggccttgcgcccgctgccgtgccacgcgccgatcgggacgaggtcgagcgagtcgccgacgccaccctcgatatagtccttcttgaccttgagccagccgagcgagcgcacgtccggttggtaagtcgccggcaggtccttctttttcatcccgcccttagacgggctggcattgacaacggccgacgacgagccaaatgcggtcgtcaccggcacgagctcgtcctccgatgacagctcagactcgccctcgacctgctcctccttaatgtcgtcgacgtcgatcagcttggcagcgccagccaccgcctcttcgtcatcgtcctcgtcgtcgcttttggggttctcgcgtacccgccgcttgagccgtttgagcgcactcttgccgacgctctccatcgcggcatcctcgtcaaagccatcgccagccttgccgatgccatcgagcagcttgaccatgatgccctccgccttattcttgacgacctcctggaagaaggctgagacctcctcgggttcctggaaagtggattaaggatttagcgaaggcagaggcatgagtttgagttgcgggcgacgcactgccgaatcgatgctctggatgtggtcgaaccgggcgatcagcgtcggcgagtcggccggtgggacgaaaggcgggatgagagtccgcaggaggtggcgccggacgcgaagcgactcgctcaggagaatctgttgtaaggtaaaagcatcagctcgggcgcttctgaggcttgacatcaaaactacttaccttgccgttcaggagcatcaggtcgaaagcaaagaggccgacctcgaccttgacgtcttcgacccggacgtccttctttgcccgtccagcgagctcctggaagggccggaaggcaccggtggccttctcgagcgcgacaatctcgcagtcgagaatgagcgacgtgacccgctcgaggtgaaagagctcgccgatggacgtgtcggccggtgaaggcgcgctggcgatatcgagcgctggcgtcggccgtgagagcagaatcttgacgagtgcgatgatgtcggggtacttgtagaaggttgcagcagcgtcagattaatgttccgtcgtgcccgccaagggggtgcaactgactttctccgtcatgtcctctagatgccgcgaaaacagcctgacaaagaccttctggccgtcctcgagcgcggtccacatgccgcccgaaccgacctcttctcgcaccaagcgctcctcctccttgtctcgcatcgcccgaacgtggatctggccgcgctgaccatcgagcttggcctcgcttgtaaaatcgacgccttgcaggcgctcgaagacctcggcgagcgagcgggtgatagagccgagcatcggcgagagaggaatcccgaccgtcagacggacagtctcctcgagccgttcgaggccggtttcgacgagcgagggcacgatgtgatggtagtttggatgccggacgtacacccgccgcatcagcttctctgcctcagtgcacttttcgcgccacctcgcacggatcgcgaccgagattggatctggcggggccgccttcgctcgacccttcgtcgtgacggacaagacttccttctcctcgagtgcctgcaggccttcgagggccgcgggcgggagataaagcggagactcgagcacctgtccgacagagggcggccgggtgagcgtgaaggctcgggcgagcgatgtcgtgagagtaaggcggacggcaccgatctgttggcgagcgagcggtgagtattcagtgaccgacgatgatggccaccgtctgagccatcgagtgacgcacccgcaggtgctggacgagcgttcgaacgagaaaccggacctcctctcctcgggcactgacgagcatcttctggacaatctggaatcaggccgataattgaagtcagccaatctgcctgacttgtctgcatcaggggagattgcccatgtgacgtacgtcgcccttggtcttttgcacacccgtgcccttcatcgacgagagcttgacgaggttgtcgtagatgcggtgcacgatgagcggcgacggctggatgagcgtccgaacgttgacctggaagtttgagaaggtcagcgtccagtgcagctgacgagtggatgtcggcaccgaccttagcctcgaaggcgacgtcgccggcgtcgcccagcctgtcgcccagcttgcggagcgccgcctgactcaggccagtgacgctctttagcgctgccgacaggatttggctgccgataccgagctcgttcgattcgtacgacggcccgatgtgattcgacaggaggtagatggtcggttgcagcgaagccgggtcgtggtgggtgatgcagcgcaacagactgcacgaaagaggggggccgaacgcttgtcagcctcacaatcacagagcacatccccctgagcagcctttgacccacttggtgaggatgcggacgattgcgagtcgtttcttggtcgccgcgacagggacaaagccggcctggacgatgaaggcgtagggcacgcgccctcccggccagcaagccacgtcgacctcctctggccgaaagagcagcggatcggtgtcgaggtctgggatgacggctacatgcgaggactgcgctgagcctagtccgctcttcgtaaaaggcttcttggcggcggcccccgtccttaagtctggctgcagggcagcggagagaccgggctgggtgctcgatgaagacgggccggcgactgcagagtcgagctcgaggtcgatctgctcgaacttgcgctttgctgccttgctggtcgtgctcagtaggcgcacctcctccgctccaagcctgcgtgccatctgctcgtctgtctcaattcgagccttcgcggctgccggccggacgacgtcggtgccgtcgccgtcgtcatccgagtcgagcagctcgatgacgtcgggagcagccgcacgacccttgcccttgtcgagcggcttcttgaccggcgagggcgtcgtcggcttggcgccgaagaaggaggcgagagtcggctggtcggcaggcttcttgggtgacttgggcggcatgggcgagcgagatgatggaggttgggcgaccaagagaagggctcccgctagacgtgctgttgcccggctttctaatcgcaggccaacagcgcagaatgagcatcttgcgagccttggctcgacttccgtgcactcgatgagcaggagagatgatggactctgtactaggcgccgccaaggggctgtccttgaccgagacgggctctgagaaaggtacgtcagccgaggctgctgctgcgcggcctagtgcaggaggtcggagagcaacgtctcgtctccatccctcaatcaaagagccatcaaggagagcttcgtgatggacataagatcgtcaacgatcgggaaggaggacctcttgggccccactctgcccgatccctcgttttcattctttcagtgcttctgcttcttgatcgcgcccccgccggcgccctcgtccttgcgcttcttgccgccgtcggcgccatcgaacgcccgccactgctgctcgagcttagtcgccgcaatgccgacggccgagtcgggcccgttgtatcgccgggcattgtcggcgatgagcatcatgtcgcgctcaaagagctcgggcgagtaacgcgggttgccggcgaggttggccttgatcgtcgacagcgaccggggctgggtgatgatggtcggatagtcggggatgttgagcgcgacgacgtcgacctgtagacgagagtaagcacgctgatcagcgccagatcgacagctagcaagaaggcgggcgtcgtacgggatctcggaaccattcgctgccgggccacttcaccagcttgttgaggagggcgccgagctccttcttctcctcgggcatgatgttgggcgaggtggccttgggccactctttggtcttgaaggccgtctccatctcggtcgcccactcccacgggccggcgatgtcagttgtcgacggcgggttaaactgccgacagctgcgagtgagggacggagacggtcagctcgggggctcaggcggacccgacaacgcccactcgcggcgacctacttgcgaaagacgagctccatgtcggcgccaaactcgccccaggtccggtactggcccttggtgatctttccgagcatcgtgccaaagtccatcggccgcttgatctcttcgtaataagttgggcagccgtcggcgatcggatcgaccggccgggcgaactgaagaggaaacagggcgtcttgtcaaggcgaggcgcagcggttagctacgaaggggagggagactcacaatgaaggcggccggaaacttcataaggtgctcgatgacgagacgcgctcgacgcggattgagcggcgtctcaacccgcgagacgttctgatgcgcgatcgacggctcgagcttgcggaacggctgtgaaggatcgacagtctgctgctggttgctcggctgcgtaggcggaaccgcaggattcgaaggagccggactcggcgctggaggttgcttgaccacagagctcggacgagcagcgggcgcagcctgagccacagcggagggcgccgttggcgagagccggtcactgccaacgctcgtcatcggcttcaacttgaactttttgagcggcgccgtcggcggcggcgcggtcggcgtgccatttgagagcgacttgctatcggtatggctcgtcattggcttgagtttaatcttgggcgcggcctggggcggcggaggcggcggcgtgcccatcaggccaagctcctcgtcgagcaagtcgtcgagcatctcgcccggggcgggctttgcctgcagcttgatctttggcggcttgatcgagagcttcttctccttgattgcgccattgccgttggagggcgctgacatcccgttcgaaggctttggaggagcagcacccggtgagacgacggtggccggaggtcccatcggcttgagcttgatcatcggccgaggagcagccggcgctccggagttggaagaagcggccgacgctgggagaggaggaggcggcattgagatcgacggcgtcttcttcaggacaatggccggcttggcggcgaccggcggtgcgggggcagagggcgtaggctgttgcttgtgctggttgagaatgtctggaaggagcagcgcaagaccgagtcagcgggtgcagaccggcaaggagggcggatgacgacgtactgttgagaatctcccactctgcagaagctcgatcggatgaggtcagtcgtcgacagaccggcaaaggtctgaaagaaaaggacgcacgcttgttgaagtagctgatgaacttctcgctcgaagcccagatgtgcgagccctcggtgttgtaaagctgggcgttggcggggatgagccggatgtcggccgcaacctgctggcggtcggtgtattggccgtcctcgagcttggcccggacggtcgagaggtccatcgggttcttaacgaacgtgaagtagctggaagagcgaagggggaggagtctcagcgcactgcggggtcgcaagcagagacggatgagagcgcactcgtttgcgccgtccttgaccgggtcgacaggccggaggaagggtccggccgtcttgtggtcctcctgggtgagaaaacgggtcagcgaggttgcaggcgatgttgagagacaacacggcgcaccatcttgcggatgatggaccggcaagcgacgaggtccatcgccgacatgccacccttttcggccttggacagcgccttctctttcttcttcttctgcttaatcgacggcggaggcgcctccatgatgagctcctcggttggctgccgcggtaggacgagcttgagcggcgcctttggaaagacggccgtcagcgaaggcgtcgtgaccgtcggcgtggctgcaaggagggagcgggcacgcatcagtgagccgatcggggcagcgcacgccacagatggacggcgacgcactggcgccactgaagagcttgatctttggcgtcgggagcgcaggcgagctgatctcggcggcggtcgggttggtgacggggatgtggatgacaagcttgggcggcagctcgtcgttcgcccggacgagcatatctgcgagttggatcattgcccagcggacgtcaaagtcaacctcgggcgcgctgggcagaaagaaaggacggtcagcgctgccctttgtctgaacgggccgtcgggcgacttacgtgacgacagtcatgatgccctcgcgcatgacggccgaacggccgatctccttcttaagagccttgatctgggcctcgagctcgtcattctgagctcgcgagatctgatcgggcgtcgagccctcgacgagctgctggatcgctttgtcgtgcggcacgcggatggcgccagtcgcgatgagaaagacgagcgcttcgcacaggccgcgggcgacgtgtcgccggacaaggcgagacgcgtcgcgggccgcaacggtgaagtagtagttggccagctctgctttgccagtcgggctgtaggcgagaaggaggcagtcgaaggcggcgaggcggacggggacgtaattgccctcgctggaggacggccaaggcgactcgtcagtcgactagcgcaagcgggcacacgtcaaaccaaagggggagacacaccgagtgtatgagaggaagcgccggatgtcgagcgggatgaggtacgccagcgtgagcttgatccggcactcaaggccagcgatggtgacggcgttctgataagacggcacgagccggtccatctccatgtaccggtcgagctcttcgaccgactgaacgaggatctcatcgttgaactcgcgccccacctcgctcgtgtcgaccgtctgtccttggagctcggctgaggtcgtcagaacaagcgagtagccgaggcaggcaatgaccgtcgcaaggtatgagccgtcagagtactgcaaggggattggcttaggccggatcagtgttgctctcgtgggccgttggccggcgtttatgcgcaccgggttggtcgagttgtcgttgtagcgcaaagcgtcgacgagcaggcgccggacgaccggccagctcgtcccacccttgaggtcattgcagcgcgatatagcgatgatgacggcctagacaggagatcggtcagcgaagggagttcgagaacggatgccagcgaccgcagcgcgactgaccttgcggacaaagtagtctgcaaaatcggcaaagtcctttggccgggggatgcagcgaaacttcaaggggtccatgtcgtccatgcctgaagggtaacaccagctcgtctggtagatcttgagcagcttaaagaggctcaggtggtcgacgcagtccttgtaagtctgcgacagcgaaagcgcaatggggtctcatgtcagcgccgcgcaagatgacgcaacgcgaggattgccgagcgctcacatattgcagcgcctgggccgcctcaatccggacccggaaaaagtagttggtgacgaggacggtctttgccaggatcgagatgacgaccggcggcgcccgttcgcgcaagacgtggatggcctgccgcaaaaagagtcagcacaagctgcgaagcccgggcagatagagagacttacctcgatctgggcgacgacgtcgcggtcgcgctggagctggttgacgaagtaaaagtcgttctggtcaaaggcaatgttggcgatccactcgaagtcggcgtcgagccggatccactcgtacggcgcgccggccatcgcctcctcctcctcctcggtccagtcggcgaccttccacttttcacgctcgtcctcatcctcccagatggcgaggtcgaacccgaggtcgagcatgtccatcgcctcgcgggcgtcgacgtcgccggcagcggcagcggcggcggccgctttccgggcgaggtagcgcttcgtgtttcgccggacgcgtttgtacttggcgttgaaagggacgtcgtacgtcttgaagccctcgcggatgtcgagcacgtgttcgtacggcgtgccgtcggcctcgtggatgcggaccgtcatttggccctgagggtcgcgcggaaaagggcagtcagcgacaggccagagaacggcagacggcgagcattcagaccgtacctcgaagccctgggtcggcttgtagtaccactcgccggccttgtcgcccgcccagcggtccttggccggcaggtgctgcttgaccgtcatctcgatgagcatcttcttcttattgaagtaggccgtcacctgcatgcgcgggcagccgctgccccaaacccactgctcggcaaagctccgcatgtcgacgcccgacaccttgcggcacgtccggaagaaggcctgggtcgagagggcgttgcccgggagctcgcccgtgatagccgagagaaagactttggggatgacgcgcgagaggccgagcgacgtgcctgtcttaccgagccgccggtcgagaatgtggaggacgagggccgacttgaggttgacaaacggcagctgggtcgcgtcgggcggcgtcaggctgccggggacgcagatgggcatctggctgccgtcgtcgagtcgcgcgcatttgtcggcgtccatcttgagccggaagcggtgctcgttgttgccgagtagccggcggaggaagagggcggcaatgtagagcgagagcccgttgatgagccacgtgtcggaccacgtcttggggatgatgttgatgcctatccactggaagacgagcgcgtgggcgatcgtgtgccgcgtctcgtacgcctgatcaatcacctctttctggtgaaggaggtcggcgtcaaagacggccatgccggcaccgctcgacgtgacgacgagcggctcgtcgacaaagacgagattgaacgacgagaacgggtacgagccaaactcggtcgtcaggtagtccatcgccttgcggaggaagccggtcgagattggaaccttggcggccgagcccgggagggagaagacgttaatcgccgccgtctgcgacgggtcgaccgtcggctcggccggcgcgccgtcatcatcggcctcggtcggggcaacggctgtcacggggatcgagtatacctcaaacggtccgacggcaaaggtgatgtgctggaccgtcgtcggaatcgactggacaaaacgaaagatcgccttggttgacgacgacgggtgcgagatctggagggcgagtcgaggtcagccccttacggttaagaggcgaggcgcaagcaaggaaagcaatcacgcacgtgctcgaccagctcgccgctcgcggcgactgtgaccgccagcccctcgtcacccgcctgagcccgcgctcgccccttgcccttgcgccgcttcgacgtgctctcggtcgagtcctcgacccaccgccgcgggacgataaagtcgagctcccacgtgcagcgctcccagaggttgtcgacgcaaggcagccagcaccgagcagcatcgggtgtcgtcggcgaggtgtagatgtgaggggcgtgccagtcctcgacgcccttgccgacaccgagcatcgcaaggccctcgccgccggcggcaacctcaaactcgatccggaggacgagcggcttgtactcaatcacgaccttatcgtccttctttccggccgacgcgtcggccatgatcatgagcccttggcgttcggcctcgtgctcgtactctgcgcgagcttcggcgcgacgctcggcctcggtctggccctcgcgccgctggcgctcgaccatgccctcgtcgacgtggacggcaagttcgccctcctccgactcggtgaaggcgctgtaagcccggcgcttagcctcagggtacagatgagcgtccttcgggtctgagagggcaatcattgcgaccgggtcgttgtgcgcgaaggccgtcttggctggcggcggccggccaccggctttggcagcctcctcaaggtgaggcgccgagaggacgaccgacttgacgcggccctgacgaaagtgcaggtagatgaccttgaggtcgagcgtcgtcggcgtgagcgtgagctcggtcaggccgctcaagaggcccgtcgcgaggtcgacgtcgagcgtgaccttttggtggacgagcgagaagccccgcgcacgcggcttctcggctgacaggtgcagcatccgctgagggatcaagccggctgcctgccagtcacgcagagggacagcggcgaggcgggacgggtgacgatgaatgcgtcgacgacggggagggggcttgagcccaggtcgatggcggaagaggacgcgagttaagggctaggtgcggccagaatcaaaggcggctgggcggcggaagctgggttgcagcgagctgctgcgaggtcggaagctgagcggggtgctggctgtcgctcggctgcgactgctgctgccgatgggcagatggatggggtcgacgggctgctgagaaaggaggaggaggtgctggtgagcagcagctcagacgacccgctggccgaccggccttttcctccgcgcgcgcgcgtgtgcctgccggcggaggcagctgcagcagcaggctggcagaagggacgagctcgcacgcccgaccgcgaccttcatctttgcctagccagtggcagcagcagcagcagcagcatagagcagccaaccagccgccccgatgtccagctcactcggcccggcgccggctccgccgcagtcaattctgccgcacctcgaccagctcctgcggcttctcgcggcgacgccctccgtcgcagccaccgccgccgccgcttcgacctcgaccgacgcccaccaggccgagatcgcagcggccgcagcggcgatgcggacgcatctcgccgagagcttacgctgggcggggacgctcaagggtggcgatgttgccgagggcgaagttgacgaggtgatcgaggtcttgacgcgccgcgtgcgcgagcagaggtgcgcactcaggatcatctcgagacgagccgccgccaagctgctgacggtttggccccttggccttccagacgcatcctcgagacgcttcagcctagttcgcagaactccaatgcgttttcggagccaagtcaggcacctgcagcggctccgccagctcgacaggatgagccgcaggaccaggagatgcagctggcaaatccctgaggccgcaccatgttcgttcgactggccttcaaggcggccgcattggcgaccgagacggctcgtgggccaactcgaccctgtgatcgccattgcgagcggcgtgggactcttcgacttcggtcaccgcgtcgtctgctcgccgctccgcttcctctgcaccggcgagaacgctccgttcgggtgcgcttggtcctctggctctcaagagctcgccggacgctgctgcgtcgacgattgaacccagcggctgcgcttggccgaccgcttcctcgcacttggggtcaaccgacgactcgctgctgaggcctgggcagcgaggccgcgcatcgaccacgctagccaaagcgcatgctaccactcggccggtgacgcggctcgcatgatgcctgcaaaggcgtgctgcctgggcggccagcgtggagatcgcatgccatgccctctcgaacaaggctctcgccaaagcgcgtttcaaagaaggcagcgtcctgcctctgtcctgcgcgccatggccgattcgttccctcacgcatagcctgctcccgtctctgcccgccgactaccatgttgagtacgacttctcggttgcgcctgctgcccggcatcgctcgttgcccctttcagccgatcgggttctcagccggttcgcgccggttcggccgaagcagcctccgagccgacttgaactcaacgacaagagctctcttgtcctcggccaccgtctacgacccagtatgctggaagctgctttgcctaaaccggaatcaacttgaccagttctcgcttactatctcgctcgtgaccggctgctcgccggtcggtcggtttggcgctcgtccgggtcaagaccgggccgggcgtccttccgaggattcagctgaatccgtcgagctggcgacctcattgtcctcgcttccctttttgaaggcgaaggtacaagcaggtcttcatcttcttcccttctctttccaaccgataaatccatcgaccaagcttactcgatgcgtctcctcccactcctttcgcttgccgcagcatccctcgccagcgttgcccaagccttccgcaacccgatcatccccggcttcaaccccgacccatcgctcctcatcgtcggtgacgactacttcatctcggtctcgtcgttcgagatctttcccggccatccgatctaccactcaaaagatctcgttaattggaagctgatcggtgcgacggccctctcggattgcacctgcgcgagctgcgcccaagctgacgccgcctggcccctccgcacgacaggccatgcgattaaccggccgtcgcagctaacgatggacggccttggacccgaggccggactctggtgagtagattcgcagggcttccgtttgcttcaaatccaggctgatgggctgcttcgcttccttagggcgcccactctccgctaccatagtgcgtcttacgactcagctccaccagcgactgcgccctgctgacaccttcaccgccgtctcctacctccagatgggacctactaccttttcacggcctcacgctgggtctacacgcccgaggttcggctccagagtcgctccttctacgtgacgaccgacgacccgtttgccgacaactggtccgacccgatctacatcgatgtcctcggctacgacgccgacctctttgtcgacgatggtgcgcgtgcgagctgttggaatcacgcatcgacatcggctgacgggactgctcggttcggctcgctcagacgggaccgcctacgtcacgcggtgcgacgtcgacgacccggtgtcgaagatctacggcatctactcgacccagatcgacctcgtgaccggtcggctgttgacgcccgaccggctcatctcgaccggctacttgcccaacaatgcgacggctcggcccgagggacctcatggtgcgaccgtgctcgagatgcccacgctttgagtccggtaagctgaccggacgctctaactcgcacttcagtttacaaaaaggatggcgtctactatcttgtgcttgcagagggtgggagcagcgtctaccaccgcgtctccgtcttcaaggggccgagcccggtcgggccgtgggagagcaatccggccaagtgcgtcgccctgtacggcaggtgtgacactcgtatcctggactaacgtatccgttatcgcaactagccccgtcgtctacaacggcgtcgacccggatacgacgactcagccgatccagtttacaggtcacgctgacctggctcagctgcccgacggcacttggtggtcgacgctgctcggcatccgacctcaaggcggcaacatcaagcgcgctccacttggtgcgtccgtgattctgcctagctgtggaggaataccttgctaatccagcctcctttccaggtcgcgagacgtttctcgccccggtcacctgggacgccgacggctggcctgtcttcaatggcaacgtctcgatcggcgagaccgggccgggactttacaacctctcggacccgctagcagcgacctctttccacgacgcgttcgactcgaccgagctcaacctctcatactacttcctccgaacgccccgcgttgcgttccattcggtcgtcgacggcaagcttcggatccagggttcgcccttctcagtcggcaaccgcgagtcgcccgcgcttctgatgcgcaagcagacggccttcaatcagcacttcgagacggtcctcgactttgtccccgagacggccaagcaggaggccggtctcaccatcttctactcggacatacagcactctgagattggcatcaccctctgcccttcggccggcagcttgccggccaacgcaacgctgctcggcaacccgaccaactcgactcgctgtgtcgtcaaccggctcatctattccaacaacgggaccggcatcgccctcgctaatgcgaccgttaccgtcacgagctaccatccgatcgacgccgacggcccggtcaagcttgcgatccagagtgagaacacccgctactcgttcggcttcacccagggcgacctcaacagcaccgtcacctatgtcggcaccatcgactcgctgcagctctacctggcgcctcctgggtgtgttcctgccttcacgtcgtctcgcgcagcgagcgacctgagagctgacgaccctgtccgcccacgctccgtagctactttctcttcaagggcgtccactggggtatgtacagccaaggcggcgggcgcaacatgtttggcaacgcggccgacttccattgtgcgtccgatcgccagaaactccttgatcggacgtgtcgactgaccctcgacaatcttcaccctgcagactggaagcaggagacgttcgccgaagactgacgacggccgagcctgcatatttcatgttccgtttcatgctcatcctgcctcatccgagccctcgtcctggagatcgctccccccgtcgctctcctcctctgagctgctcttgtcctccagagcgagcagtgacgcctcgtacgtcagacgttgcaggacggcagggttaagtctcggcggctgccggcgcacatcaggctggctcctgtgggaaagcggcgatgggcaggacaagagtcaggcagcgggcaagggtggtcacaggagtgatcgactgaccaaggcagcagagtccaagttgaccagccgtcctcgagcgccgcgcgagtgttgcccgcccagccgaggtcgaacggcttctcctccaccctcgtccgcagagcgacgcccgtcccgtcctcggctgaggaggggatccagatccagacccgtgggtcggcaatcaggggcttggttccatcgttggtcgagggcgaggcgagataggtcgtgcgaagacgtgggtcaacgcggcggtaggccgcttgaatgcgcgactcgattggagtgaccgagaacaagatcgagcggagcgtaacgcaggcaagcggctgaggccgagatgcagagtttgtcagcgtatcttgtgacggaaccaatccctgaagcgcgggacgcacgatggccacgagggagaagatggcgccgaagactggcaggagggtcagccagccccgttcgagccagctgagctcgcccaaaaacttccagtagcccatcacaatgccgaccccgatccgtccgaacggcccaaagccgaggatccagctccacttccactcgaaccaggtttgctggatcaggctttcgggcgcgcgggcgaagcgccagacgcgctggaagtgccgaattccgggccggatgaacggcggactgaggacgccgaccgagacggggacgagtgctaggaagagaatgaacttgaggtatgagctgctggtgatgcacgtcccgaaccacggacaatggtgatcgaagccaacctggaaggcgacagtcccgggactcgtgagcacagcgaagcagactcgcggtcttcgacccggacagacctggcacgtccggcagatgctgcaatggcgacagcggccgggcttccagctcccaccacagccgtcccggtagcagcgagggatcgcgcccgtcccgtcggcgcagacgaagacggctgtcttgtcggctacggcctgcggtggctcgcgtggcggtgctgcggatgacgccggcagcaagtagaccgagagaaaagtgtagagcagggttgggagaagcgtgttggcggcgacgaggtaagggagccgccatcgaccgagctgaggagctgcaagcgtacagacggcccagtaggcggtcctgaaggggcggcgatgagaaggggttgcgcggcgtcgtcagctgctgcggccctcgcccagtctgaccagctcagcagcgacacgcacaagatgtagccgatcaagaccggcggcacgaccgtgtcgagcaggtcaaacttccggccgaccttcgagataggattgacctcaccttgagcggtggccgccgtcgctgcggtcgaatgaccagcatcgcccgcaagggcggccggcagaagcggcgtccgcggcgtaggctcgtcggcgtccatccgacgaaagagcttgcagcggtgtgcggtgcgcaggtgggagaggatttgctggcccgcttgagggcgggttgcaaagggtgaagcagctggtggacgtcgggaggttgcttcgacgactctctttccgacgtcggagccgagatcggcccggcggccgtcgtgagctgcaggaggaggtgaggagaagggccttggcctcgctcctcctggacgaccaccctctcctgaccagtcttgacaggtcctgacagtcaatgtgcgtcgcatcgacaggctggcgcctacaccgcgtgctgacgcctccgccctcccttggccgacagatggcctcggacatgccgccatctcgcccgacgcgccggccgctcgtcggcacctcgctcaagatgtacttctcgccctcgcggacggcagcctatctcgagtcgctcgtcccgcttggcaagctcgctgcctcgctcggaattgacgcattcgtcatcccggactttctctcggtcgcgtcggcggcgacggcgctggccgactcgcccatcctccttggcgcacaagactgctgctgggaggccgaaggggcctttacgggcgaggtctcgccgaagcacctggccgagctcggcgtgcaatttgtcgagctcggccacgccgaacgtcgtcgttacctcggcgaaacggacgacctcgtcgcgcgcaaggccgccgccgcgtgcaggagcaacctcgtcccgctcgtctgtatcggcgagagggaggaccgcggggtcgacgccgccgtcgaagagtgcaggccgcaggtcgagtcgctcctcgcttcgatcccggccgaggccgaggtcgtgctcgcgtatgagcccgtctgggcgatcggccagcccaagccagccggcgccgagtacgtcgtcgccgtcacgaggcggcttcgccagatggccgaggactttgcaggacccaacgggaaggcacggacgggtctcgttcgcatcctctacggcggaagcgccggcccaggactctttgcccacctacgcgagggcgtcgacgggctctttctcggccgcttcgcgcacgacattgccaacctcgagcaggtcatgcgcgaagtcggcgggcgagcgccctgactggttgcgtttgatggaccatgcgctatcggccctccttgcgcatcttttcctcccactcgcggtagtagcgcgcgtcctcggcccgctgggcggcctcggctagccggtccttctcaaactcctccttgacgccctcgaaccaagcgtagacgccgtgctcctcctcgccctcgggcgcggcaccctggtggaggatgctcgggatgtaggccaacggggtcgcctcgaccggggcggcgggatcggccggtgagcgccgcaggaagtcggggacggcaaaggagatctgcgcagatgaggcgtcggcggcggcggtagcagcggcctcggcttcctcacgcagaaggccctcctcgagcgaagggaggatcgtgacgatcttgcgccggaacataggcgtgaagtcggccggctgcgggtggggcagacccgtcagtcaagggacagagcgggccagagcactgcagaccagacgtcgctcacctcctcgacaccgagccaccagcaggcggcgacgaaggggccgccgacgaggaagacggccaggccggtcgccatggcgaatgcgcccgccgcccggagcatgacggccgtcgtcatcggcggcagctcctcgtgctcgtcggcgtccttcttgcggccctccttgatgaggctccggatcgtcgctttaggcgcagctgctgagtcaggagcaacggatccagtcgagactggtgtcgacgccgtcggcgaactggtcggcctggcctgcgaaggcggaaagagctgccgaggcggtgccgccgtcgccggaccaggtgcaggtttcctcaggagcgacgctgtcgcagccgagagcggttttgacgacggcgcgccagcgagtgtcgcctcagaccccttgacagccgcagcagcggcctggaacgggttgcctcgcgagggctgctgcgaggccgtcgtcttgacgcccgcgagtgagcccttcgacaggatggatgctgtccgacctggccgtgcgcctgagatgatctgcccgctcgccggcttacctcctgcgacgcctgcttcggcagcctcagctgctgcagcggaggcgctcagctccatcgtcttggtccggagctggctcacgcgtcggaggccgatgaggacgccgactgtgaccgccgtctgtcgcagcagccaatggaagtcagcagtcgtcgcttgagcacagcgagagctagaccgactcacaccggcgcatgcaaagatgacatagggcgcgttcgggttgacctccttcctcgtcggtcgaggcggaggcgacgacggctcgggtaaggtggagggcggcgacgaaacaaccggcataacctcgacggcctgtgacgacggcaatgtagcaggctcgtgctgctggacagcaagcgcaggactagagccatctgcgctaccagcaggagtcaacttgagccaggagagcatgatggcggtttcggagggggagagcagcaggtgcggcggctgagcccttctgccagcccgcggcggaggcgagctgctgccctgaacgacgactcccgacccaacctcgacggctcccctctctcggaacgggctctctctggcctaggagactctctctgagacggttcttgtagtgagaggtccgtccaggtagcttcaggagtgggtggaggtggtgcgctgaccgccgcctcttcctcctcggtcgtcctcagcttcgacgcgtgcagcttggcttcctctcgccccatcctcggctggcacggacctggaaggacggcgcgtagtcaggacggactcagcagaggtctctgaggcctttatgtcagagcgatctgcctcctgcccctaccttggccgccctcatcgtgcggctcagcacctgctgcgcgctcagacccctccctcgagccaggccagccttcaccgcgtcaatcgagcctcgtcggcccctctcctgttctcgctggactctgtcaggctggagggatgtccacaagcggcccgcactctcagctaccctcttcgtccaccgtctcctcactttccaccgctggtcggcccaagctcgacgcacgccgcgcttcagtcagcgtaccggcctcgctcaatccactcgcctgcctcggctaccgcaagcaagttgcgacccagtcatcctctccagaccttcgagcctcgacattgcatgcgccgcgacagatcccacgtgagcgtacagggtcgacggccaagtcgtcaccgccgccgcagacgcccaccgcgtcaagcgcctcatcgcttgcctctttcgccgctgctcgtggcccactcgcatctatccgcaacaagctccggacgaggtcttcaaccggctcgcttcgtcctgatacggtaatctcaggcagtcgacctgcgacgatcaatatctcacacccgcgcccgctgcgccctcgcctatgctcgtcggcctcgtcgaccgccgttcctttgtcgccaccggttcttcctctccctccattgcggaccctccgacattccgaaaggttcggcgagttcggcgagctgcgatgccgtaaagtagcttcggcatcactcggctcgccgccctctcgtcgtgcacccagcctgagcgactacggcggccgagacttgccttccttcggcgagatgattgagagcgggccgcacgctcgtttcagcattcacagcacctaccgattgacggccagcagcagtagaatatctgcgtcgccggagcagcggccaagtctgatcaagcggcggcgcgatcagttggacgagggctggcagtgggtcggcgtgagtctgttttcgctctttgtgtaggcttcgacgacgactgaccttgctatcgtttccagcgcacctgaatacctttcaagcccggttgcgagtcgtgaccaggccaatcgcctccgagccacctcgcgcttcgcaagacgcccgactgcaggtcgacatgtccacggtcgaccctgcacgtatacctgaccctctcccttgataccctcgctccactttctcacgatccttcggaccccttacgacccacgtctctcctctgcgacggccaacaccacgcgcctgcctcaactcgactccgaatgagatgtcttcatgctctgcaccgcaacccaacgccttcgtgcagccagcgtgacgtcgtggatgactgactggtgtcggggacggccaggccggggctgctgcgcacttccgctttggcccgtgttgagagctcggcagagggcagagaaggtgctccctgaccgccatcaatatacttggacaccgactgctgctctactagccggcctagaagcccgctctgatccggccagagatgcgtccctcgctctcccgcagaacgctcgttccgctctctcagttcggccgcttcctcccgctcttctcgcccaggccgaccggctcgccgccgaccctccctccattcccgagcccgctaccggtgcctcgcgacagcgtagcgatcccacactacgtgccgcgcgacttctggggctctccgaggttaccaaagtaccccgggcgggtgccgaggggcgggcggatcaagctcggaggggaggaggagcgaaagctgcgggcggccgcgaagctcgcgagagatgtcctcagccgagctggcgggctcgtcaaggtgagttgagctgctctcaagggcctcacacactggcaggctaagctgataactcgccctctccaccttgacagcccggcgtgacgacggcggccatcgacaaggaactgcacgagctcatcctctccgccggcgcgtacccctcgccgctcggctacaagggctttccaaagtcgatctgcacgagcatcaacaacgtgagccctccctgaagacgctttcgagtcttcacggctgacacgagcctctggcggcaaataggtgatcgcgcatggcgtgccagacgagtgagctcgatacaggaggctgcgcgcggtcccttgccgcggtgcccaggactgatcctttactctcgcagtcggccgttgaacgagtacgatctcatcaacgtcgacgtcaccgtctttctcgacggctatcatggcgacacgagccggacgtttctcctgccagcagccgtgggtgccgcaacctgcgcctgcacttcgtccgccgctaacgttctttcgagacgctgtccatcaggatgaggaggcacatgtgctcaccgacgtcgctcggaaatcgctagaggccggtatcgcagcgtgtggagcgggcgtgccgttcgaggagatcggtcaggcgatcgagtacgtcgtctcgctccgaccggctgcacgacaccgcaggctgatccgcggcttggcctcgccacaggtcgtacgccatggagcaaggctacctcgtctgcgacctgtttacagggtgcgttctgctctgatctgctgcgctgcgtttcctaatcctgacggccttgtctcctgctcccctcttcaggcacggcatctcaaccgagttccaccacccgcctcagatctcacacacgtccgagtcggtaccagagggcgtcatgcagcccggcgactgcttcacgatcgagccatcggttgagcagctccatgtcggcccggacggcgaggttggaggcggcgacatttggaaggacggctggactgtcgtcacgaaggtgggtcgaccttgtcgtacctgggagcacaacgcgatgctgacgccttcgggcctaccatcagacgggtgcacgtagcgctcagtttgagcaccagatcctcatcaccgaccagggcgtcgaagtcttgacagcatgagacactgcaacgagagtctgcgggccttccggccctcaatttcgcgtcagccagtcgccgagcccgccaccgccagagcccccgccggcgccgcctctggcctcccttccgcctcctttcgtcttggccttgtcgtccggcttcttcttgaccttgcgcgacccggccgtgtccaccttggggaccgccttcttgtcgggcaaatcctcctggaagctcagcgcgacgtgccagtcctcgtgctccattcggacccggtcgttctctgccgtaatccagccgcgatcgtcctcgtccgcgtcatcgatgacgagcagcggcagtcgcttgcggcactgcgggcacgtccaggacgacggtgaggctgcggtcggcgctgccgtcttgaccttcttccgagccggcgaggctggcttggacgacgctgcggaggtcgatgcttcggaaggaggcgggccagagctgctcccgccgaccgacggcttgacgaagaagctgtcgaacgtgctccttcgctcgacgacctcgatgtcgtcctcgtcatccgaaggcggtccaacgggagccttgcgcttgaccggcggcaggccgggcttgaagaagccttcgatgccgcgctggccctcctcgagccgctcgagcgccgaaaagccgaggccaagattgttgagcttaatcttcttggcgccgggcttgacctcgggcgggaggacctctccgcagagccgcatggcgagcttgaggactagaccgtccggcgtcagtggccgatgaaaggggaagggcacctgctttgtgcgcgactgctggccgactgtcaaagcagagtacgtgcggtcagtcgcggcttccgaggcgctcgtgcactttggaccgaccttcgcggtacgtcaagctgagcgtctttggccagacgccgccctcgccgtccccatcgaggccgctgtcctctctggccgatttgagccggccaatgagctcgatgcagagcatcttgagccaagccgacgcctgtgcaacagacgacaccggcggccgcatgttcttggacgccagcattgacttgacgagcgatttcgccctgactgtgaaggcagcaaggaggtgtcagacggcgatcaggacgcgccgggcggagcggagacgtctgacgaaccctcgctgaaatcgacaccctgcaatgacgagcacaggtgtcagcgcgagctcatcgagccaagacgacgagggcacatactcggagaatgttaaagacccagaggctctcctcgccaaacttggtttgcatctcttcgagcgagacgtagctgaggatcactcaaggtcagcgacagttgcgcatgtccaggcaggaacgatgcagctcacagtaggtcgccgacggtcacggcgccgtattcctctgccatgatcatgccgagcttgccgccaagaaaccggatctgtgacaacaggtgcgaggtcagtcgcaggttgaaagaagatcgctgcggccgcggagcaccttttggaacttcatcggccgtaggaaggccgcgacggcgctcgttcgaaggaccgtctgtgcgcgaggcttcttgaaggccgagcacagcttcgaaagaaccttgttgtgggcgatgccctgatgaggagataaagcggatcagatgggtcgagcggcacgcacgacaggcgtcgaggagacgaggacgcacagcagacgttgtgtacccgagctggtcctcgacagccttgcggatctgctccatgagctgtccaccgacccaaagggccatgtcgccccaaccgttgccgtggacctcctcatcgactggcagtggtgcaggagccttcgactgctcgccctgcgaggcgctggcctcttgcgaagcgctcgcgacctgggctgcgacctcggtcgagcgcgggacgatgccccagtcgaccgccttccagtcgagaggcggtgcgggtggcaaaggcgtgtcgagcccaagcggagcattggatgggacggtggcgaggtgggggaagcgctcgagcaggaccttacggacaggcagcgtcaggtcgatgaaggcctcgtcgatcgacgccttctctgcgagcagggggttagggcagatgccagttagcagacggcggcagaaccatttcatgaacgtctggagactcaccgacgccgccatctggacactgctcgttaaagactttgatcatcttctgcgactcgcgccggtagggctcgaggctgacctggcagcgccgggaggcggttcgagacccggtcagcccatgactgccttcgcctcagagcagagctgaagactgaccttatggttgtgcatgctcggtttctcgtggtagcgcggcgcatcgtcaccatccttgagggtcgcgacgtggcagaggatgatttcggggcacttcttcttggcctcctgggcgttctcgtgccgggtgatgccgaacgcccgggcggcataattgatggcgatcaggccctgccactgctgtacggcgatagggacagagttgtcgaacccgagccgctttgcctcgaactctgaagtcagacggaagccggtcggaagcaggttagcttgggggcgcgagcgggaccgagctcgaacaggcccgagcgagacgcacgggcataggctgcgtcgacatcgcaatgggcgatgacccggagcggattggtcggccccaggctctgcgctgagagaaggtgtctggcagaaggtcggccggaagggtcatcgggccgtcagctcctgtgttgcgagagctatgcgacgaacgcacctgtaggtagccaccgcgtcgggcgcatattccttgtcgaggtcgcgagcgaggtccgcctgcgagagctcacgcttgggagcgctgctcgaaggcagctcgaaaacctctggcggctggtcgtcatcggccggcgaaggcgagggcgagcgaggcgacgcaggggggagcgactcgccctcgtcggcttcgtgctcgagcggatgcggtcgatctgcgaaaggattcgacgtcgagccggctgccttgagcggcgaggagcggcgggccggagagctcatcgagaagctgagacgcccatgggctttggagaaggaaggacgggttgttgacggacgctgacaggcaggcagaggctcggagggacgggacgaggcgcacgcgtcgccaggccggcgcgcagccgacccgctgaatgtcatgcgtacaaggtgcgctgcacttgacttgcagaatggaagcgtactggcctgagaaggtacgacgaggaagtgatggaagcatggattgagtggatgtacaagggcggcgggccggcgcgggcagcgctcagacagcaggccagaaccgctgctcgagccagatcacatacttgacgacctgcggatcgaaagacgccgaaggtcagcctgaccgaccagcatgagccgataaaggatgagacacgaagtacctcctcgcaccgccgccaggcgtcggtgccctcctggagctcgagcttgtcgacctcgttctcgcacgcagcgacaaaatcgacaaactcttgcgaggtccagttagcgataagctcgatcagtgcggccgagacgagcttgttctcgggcgtcgcgctcggcgtctgacgggcggcgaacgtccatgagtcgaggtagagctggaggagggcagcagggtcaaatcttggtcagcggaccgacttgaacgctgaaggacaatcgaaggttcttaccttctccatcgcccagaggaggacgagtccctcgtccagacgtccactcgcacccgtcgcgatcagagtgtcgacgtaggccttcgtcgtcgggttgagcacggccgactggaccgcgccgccgtcgacggtcggcgtaacggggtaagcgaggtcgaggccaaagcgtgggccgagcgagtcaaagaagcccgtctcgcgtacgacctgtgaagaagcggtacgacacacggaggtcagcaggtgcgagtatgcgatggcagaggtgcgggggatgcgagggcggaagcaaacgtgcccgagcggaacctcagaaggtgtcttcgacttacgttagagagcgcaaacgagagtaggacgagcgtctcgcgtgcgccttgggcagtcaggtcgagtccggtgataagatgggctggaggcaaggagcgctggtcaaccggccgttgtgtgattgtcagcacccgagaatgcggcctgcgcaccaatgaagtgggggtctggagcgccgttgaagagggtcgaagggcatgtcaataaagcaggctggatctcctccaggcgctcgtcgcacactcacagccgacgaaagcgtagatcttgtcctgggcgagccactctgagaggacgtcgcggtcgagggcgtgctcgccggcgagccggaggaacggtgcttgcgtcgcctgcttgatgtcggcgtcgtactttgcgaggatcgtctggatgaagctgctcatgctaggcccaggtataagatgggaggtcaacgtcggcaggcaggagtcgaggacggatcttcgtgtcgtcgacgtcggccaggtcccgacgaccgaaggcggggctccgcaactgatgcgggcatgctggcagctgcttgcgcggccctcagaagaagagactgaccatcacctcgcccgctcgctcggcaggacaagcagaattcacaggagactcagctagcatgacttcaacgactgcgagcagcgtcgtcctcgttggtgcgaccggcctcacgggtgcggcctccctccctctggcgctcagccttcctcccctcttcgagctgccgcgacgggccgacgacgacctcatgctgctgctacatagccaaactcaggactgacaacgtgactcaccttctacaggcgccgcctccttccgctcgatccagagctcctcgctcttctccagcctgacgaccctgacccgccgaccgctcgacgctcccgctggcgttgtggccagctccggcccagtttacaacaacaaggtggtcgattttgaccagcccgcctcgtgggcgctctccgaatcgtttggctcaggcgcgagcaaggtctttgtctcgtgcctggggacgaccaaggcgcaggccggatcgatcgacaaccagcgcaagatcgacctcgacctcaacctgacgctcgcgcaggccgccaaggacgctggggcagacactgtgcgttttaactgcaaaggacgacactctgtaccaggctgacgttcgtcctctgctcgcagtacattcttgtctcgtctggctcggcttcggcgacgtcctactcgccctacctcgcgatgaagggcaagctcgaggacggtgtcaaggccatggcgttccggagcgtctacatcctccagccgggcctgctgatgggcgcaaggaccgagagccggactgcagagggcctgacacagtcgcttttccgcgggctcggtcggctcggcgtgccggtcgcgcggtactcggtcgacgcagaggagtctgtccctgcttggcgtcagtcactcacaaaccatccttgctgacctgccttctccactcgctcgcagcgtcggcaaggcgattgccaagctcgcggccgagcgcaaagagggcatccagtgcgtcgtcgcattgtccaagcgggctgctgccgatgaagactgatccaccctgtcactcgttgttgtgcagctacgtctcgaacaccgaaatcatcgctctggcgaagagcgcgtaggtcattcgatggtcgagcggcgtacgtcgtgcccattggcccatcctccgtttacgtgtcctcagcctctgccacctcccaccctttgttgtacacgcacattcatgagattcccacggcaggcggcgaactgctctggcgaaaaggcagactgatgctttgacagccaaccagtgtactacagtcgctcggaaagggccgtaagcgcactcgtcgggcctggcagagcttgctgcgccgtcgcggcgtcgcgcccacggtggctcggccctcaaacagccttcgtccctctttcgacttgccctcgaaccaccaacgccaccctcttctccatcatctgcgtcatctgcgaactggacacggcatccgccgcactcgcagcttgaaggccgatgaagtacagccaggtgcgagccgctcttcactcgctctcctctcctccggcccgcgccgccgtaaacgagctaattccgtcctcccctcctctgctcaggagtacactcggatcctcgaagagtcgggcttcccactcgaatggcgagaggtgcgtcggctctccttggtgtcttgctgcccgcgagctctcggctgactgctctctctgcctctcgctcttcgcagtcctccatcgagtacaagaaggtgcggcggcggcagaagcccacgttggtcgctcggccccgaagcggtctgcagctcgctgaccttgccaccccctcttcttgctgccttgtcctcgccctctgcagctcaagaagctcatcaaaaaggtttcgaacgagctttcgtcgctcggcctgaacccggtcgtcctcaaccggctgctcacgccgccggacgtcgccgccgccggccacgctccgacggcagccgccgcgcaggtcgactcgccgtcgcgctcgtctgcgtcttacgtccacccctcagagtcgccttccgagagctcgtcgaccgccgctaagcgggcaacgaccgactcgcctgctgtcgacgagctcgagtttgagtttctgagcgagggcagctcgtcggttgcagagactgagggctcggccgcagcagacggcgatgccgaggcagctcacgacgacgacggcggccgtgagggtcgcgagcgatccgttcagcgctgggttgatgagaccggcaagcgcttccgtgtccgcgtccgtgaggagcgatcagatcgcttagagagcgccggcggcgagtcgggcctctcgctcgcggacgacgaggaagatgacgacccggcgcgactcaggcggcatcggacacgtcggagcagcggcgtcaagcgcgaagccatcagcgtcaagggcggcttcactgccgagtatgagattggaggtgcgtctccgctcagtagagaagcctgcacgagagccttgcaactgctgctgacccctttaatccgccctcacttgtaggttcggctcagcacccggtgcccaggatccggctcgtcccaatccattcgctcgcacgccgccggtcgacctcgtcgcagcattcatcgcatcctgaagagtcggtctcgtcacgagacccctcgccgtcgtcgtacgactcgcggaccggcatcgacccctcagcgtttgacgcgccgacaccccgacctccgccagccccgccgctgattgagccgctcatggcgagcacgacagccgtccttcctgctgagcctgcgcgcgagcccctctggctgctcacgcgtggtgccgaagagggcatggcacggatcaaagggccaagcatctcgctctcttcgccgccgaactctggtctggcaggtctcagcctcaaccgtcgcacggaagaagcgagcgaagcggatgacgacgaggaggatgaggacgacgacggcggagaggaggccgtcgtgcccccaggctatacgtcagctctcggcatcaacccttcgctcggcatcccgatcctttcgatccagccggcgactccggaagggctcctcaagaccggcggcggtggccgcgagatccgggacgacgacgactttgatctcggcggctcggcgctggatctgccgcccgatctgacggacgtggacgactttatccagacgccccagaaggagctctacctggacctggcatcggaccgcgaggtgtgtttctgcattagatgcaccagctaatgagacgtccggctgaccgcctttcctgctgcagttcttcaacgtcctcacgcacgccctccaggcgctcgacacgctgcagcgcaaccagcaggcgctctttcggcaaaaggtcgaccacctctgcacaatgatctcggccgcgtctgactactccgcggcgagtgcccagcggcacaagattggcgccaaggccaaggcgatcctgacgtcgagcgacggccactcggatctctacgcgtggcgcgaagtcttttcgctctggatcgaggccgagatctttgagagttctgctgagcgcgaccggggcgagaggacggtcgaagaggccgagaggcgactcaaagcgtttgccggcgagctcaccaagcgtgggctcggtgacaagcggacgctgagggtgcgccctcgtctttctcatggtcgcccgcttaaccggagctgacagctcttttctttccctctcttgccgctcagtccaaagactcgcggatggccttcactaccttcctgcagcttaacctgacgctgctcgacctgaaaaagtttcacacggccaacatcgaggccgcgcgcaagattctcaagaagcacgacaagcggacggcgctgacggcctcgcggggcttccccgaatttgtcgtctcgtcgctcgacgccagcggctcgggcaacgtccggacctggacgctcttcgactcgtcgctcccgcacgtcctcctctcgtcgctcacgtcgaccctcctgccggtcattccgagccttgacgactacagctgcgccatctgcacgagcatcgctttcaagccaatccggctcgactgcggccacctcttttgcgtccgctgcctcgccaagatgcagcgccggggaaaggagctctgcccgctatgccgggcgccggtcctcgccatcgccaacgctcgtgagtacccctccgtcaagcccccatgacaaacgtcctgacccccttctatcgccttaggcaacctcgataaggacgcaatggcgtttatgaagcagtacttcccgcgcgaggtcaaggtcaagcagaaggagaatgagcgcgaggtcgcaaaggaggacatggaggacgccggcatggacgccagctgtgtcatcgcctgatgcctcatagctggaacgtgacgagcatgacatatcgtgaagggcgtcgaacagggggacgcataagtgatgggaaagcgaagaaagggggattctgaaaaaggggctggctactcgtccatctcgagcagatccgactgttcgtggacaggcgagctccagcccccgtacttggccggctggagtggcggcggtagagccagaccgatgccgctcggccggggcttgaagctctctctccgggccttgttgcgcggtgcgaggggcgtcctagcgctggcactagacgtcggttgtgacgtaagagccggcatccgagccggggctcggagcggtggtgcagccgacgtggagctgccaaagacgttggcgacagggtttccgtaccagctgctgccaccggcgccggcaaaagcgccgctgcttgctgtcgtgatgctcgacgtcgtgctgacgctccgcataccagccgacgagctcgtcgccgagcgcgagacgctccccggccgcgggaggctgcacgcaattcccccggcggcggcaggcgtcgcgcgcgagatcccggtgcgggcagtctgcgccgtgcctggcgttgcgcggacggccattcgcggcttgaccgacgagggcgcagttgtggacggtgtcgggggcaccttgcgcttgacggtcgagccgacgacggagccggacgaggacgaggtggcggacggtatcctgccgcgggcggagggggttgccgaggaagcagccgtgcgagagcgctgtgaagccgagaacaggcgagcatcagaatcagtcacgggggccagctgatctttattcagggcgagccgtcacacctgctttagatccttctcggcctgcttggcgtcgagcgccgcctgaatcgtctcgatgatgcgctcgccgttcatgcaaaacggccgctggtgctcgtgctcccaagccggaagggcctgcagcagtttcgtctcgatctgaaggtgcaagcagcgtcagcacaacatccgggtggggcagcgccatcgttctagaggatgacctttggcttgagtagcgtcactcgcttgcgcatcttctcctcagcaagcatcgcccccggcggcctccggcccgtcagcctcgacgggtcctgcgtgatggcgagcagctcgcgctcctcgtccatgatgtcgagccactgggcgacgaagcgcagcaactcgcgcttcgagctcgcctcggcttggaggcgctcgagctcgtgctcgtgcgcttcgagcagctcgtccgtataattagctggctcggcggagcagaagagagaacgttcgtcagttgcggtcagccggagacgatcgggcaggggacaagacggagagaacgcacagtgccacatgtatgggaaggcctcgcgctcctcttgactcatgagcagcgtgtcctgggtcgcctggatctcctcgcgcttcttctggataaactcttcgatgaagtccttcttgagcagcatcatcttttcgagctcttgccggtactgcggtccggttcacaaggtgtcagccggatgctttgaacagcgcagggcgtcggtcagggacgtacgacgaggaccgactgctccgagataccctgattgagctcgacaaagcgctcaatgtcgaccgtcgagacattcatgacggcccagagcatttcgagcttgtcgtacatgcgctgaatctcgccctcgcggtgggattggatcgtcgcgagctgctcagtgccgggttgaaagcagggtcttctcagcagtagcaccgcaaggaggtttaagagcagaaacggaccgtttggttgagctttgcgacccaatcaatgaggtcctccgacgcctcgacgccttcgagcccgccctcgccatactcgtccttgacctcctcgtcggtcctctcgaccgcccaggcgatatagtgcgcgacgagcgcatagccgtacgtgtcgagctcggtcggcgcgtcgggcgccgtcctgcgcggcgagggcgagactggctcggctgccgtcgtcgtcggtgatggaggaggcgtcgaaagagggaaagggagcgggatggggaggacgagcaggtcgacaaagtcgtgcgtgagctgcaagagctgccggaggttgagcagattggccgcctgacaattgacggaacgggggcgcgatcagtgagatttcctttgagcacaggctcactgaaagtcctcaaagcgcaggaacgcacgcagtcctcctcgccgcgctggatgaggttctggagctcgacgacgcgcttctcgccgacgtcctcgaacgccctcgccggctcgccgccgccggccgccagcgcgagcttctcggccgagaggctctttggcaggccgaggccgatcccgctcgggccgtagcgagcttcgcttgtgcttgggaagttggcggcggcggcgtgactaaggaggtcggccgccagaggaggaggggggagggcggagcgtggggccggcgcgggctgcctccccccccccggaagcgagaaggaaggagaagaaagacggccaaggaggagggaggccgaacgcttaagctaagacggtcgggaaggtttctcttgcttcttcctctgttcgacgccttgagcccctctccgaagcatactggaccagtcacgcgtcttctagaggccgtgattccctgcagcagaggtcctccagcttgacctgcagcacgttcgcctcttcctctgcatgcagccacgcgagccacccttaagcctccccgggctcattcgtgctcatcagcctgctggtcgacgcctgaccttgtcgtcgctcgccggttcgccggttcgccgcttcggcgcgccgtgctggtctaggacccgtcgtcgtggcttagcgcaactcgtcgtttagcgaccctgcgagtgtacccttctcgatgacgctgtcgccccctccgctcctcctgactgagtcctgaagaagatggtttctggtctcgccttgctgcaaccgagatgctgacgctcaggtcgagtcgcttgcttagagatcgcgcactcacaggaaacggatgaaaagatctacacgccgaatccccttcggtcgacttgagtccagtattcgaaggttttgaaagaggaagggaaggcggcgacgctgcattagccgaagaagggaatacaagggtggaatgctgcgcaaagaggatgaagcgaggggtcggctagttgtacacggtcagtgtgagcgaagggagtaacttcctgggcgaggggctcagctccgtcggcgcgaagcgcgagccgatgcggcggccctgctcgactcggtcgtcggccgcttgaccggactcggctcgtccgtctccccgccgccggcatcgtcgccctcgtcctcggctttaacgcgcgatgggctcgtcgtccgacggcgggtcgaccgcctgagggtcgccgaggccggcgtcaggcccgacgggccgccgtccttccgtctcgtgttgcgcgcaggctgccgagcgggcgtgtgcagcaggccattcgcgcctgctgccgaggggccggtggacgcgctccgcgtctggcggctggtcgtccgaggcttgatttcgagcgggctcggctcggcgccaatcgatgagagcgaggacgagccgccgaaaacgtcgagcggtgccggcgtcgccgagggcgaggccgagtgcttgcgcttgcggctgccagacgtcgaggccggagcggcagtgggaatcggaggtgccggtcggtgagcgatcggcgggtgtacgacagcgggtgcccttccatcaggcgcgctgctcgccatctcgaccgcgatcgaagcgctctcgccgagctgctcggccgaatcgtagtcgtcgtccatccgcgtatcgtcggccgcagctgacgatgacgagaagcgcgagaccgggccaaagggccgtgctgtgtcggttaggaccgacatgtcctcatgcggagagaaggcatcgtcctttggccgcacgccctgctgtagcgttgcctcgatgttgagcttggcgaacggctgcgagtaattgtcctcaacgccagagggcaccgctgagagcgccacggccgggtcattgtcgccgtctgccccaccagatgacttgtcggtccgggccgtcattggctcggtcttgccgagcgacgtgatcgtcggcaaggcgccttcgtcgagcgcagatggcgcggcgacttgcggcagccggagccacgggtgaagcagcgccgtctcgaggctcatgcgcgttgtcgcgtcaatcgtcagcaggcggtcgacaaagtccttcgctgcaggacagaagggttttaccgtcaggagcgagcaatcgtgcagcgagcgatggagcggacgcaccgatgcccgagacaccaaagtcgtcgaacggcgtgtagtcgacgcgttccttagctctcttcgtcagcttgacctcgatcgtgtcatccttgtcctccgagaagggcaagagctgcgcaaggagcgatgatgtaggtcgatcagctgcttgtccgtggccgtacgaaagaagaatccgtaccttcgtgagcatggcgtagacgatgatgccgaccgaccacgagtcgaccgcctgaccgtagccctcgcccttctcgtgcaggacgacttcgggcgcgagatactgcggcgtgccgaccatgctcttgagcctgtagcgcagccaaagggagaataaggctgagtgtcaggagtcgacctccggatgctggggaaagggcgaaggacgcacatggttccaccgctgtcctcgatcatcttggcgagaccaaagtcggcgatcttggcctcgggcggctccgagtcagtcaggagaacgttctgcgtggcaaaaagcggcgttccgtcagcgcgatctgaacgattcacaggagagcaatcgacggacctcgggcttaaggtcgcggtgagtgacgccctgacgatggcagtaggccatgccgacgcagatctggcgcgtgatgtcttgcgcttgagcctcgtccatgccggcttcggtgtcggtcgacatgatgaagtcgagcaggttgccaccggcaatgtactcgaggacgagatagataaccgagtcgtcctcgaagcactcgataaaggagcagatggcgggctgcgaaccatatggaaagacggctgtcagtgcattgaggcaaacgtgagacgcagatgggcattcggggcgcgtacatggcttagcgcgccgaggatctcaatctcgcgctcaaagagctgcatcgtcttcttgttgctcatgaacttgtgcttctggatctctatcgagtgcacgtaaagttcgagcgcgtcagcaagcgtccagtctagacgccggaagcgaacgactgacccttgattgcgaccaactcgccggtctcgaggttcatgccgcgcttgacctctgcaaacgtgcccgagccaatcttttcgctgtaacgaggccgccgactctcgtcagcgctggctcctctgccgacagctgcaatgagtggctgtcagacacgcacccaacgtggtacttctcaaagatctcgcagcgctcgagcatccgctttgcgacgctacagaacatcagccggacgccggcggacgccccggccttcgcgccctgggccgccgccgccgccttgctcgacgacggcttctggccgagcgagatgtcatcgccgtgtcggaggacgcggcgcttgtgcgggacgaggcgttggcctacagggagaggaacgaagggcgtcaaaaacgagagagcaaggaggatgagaaagacgcagagccaagacctaccgttgacgtaggtgccgtttgacgacctagaagcagcagtgcagactttgtcagcttcaagtgcagacgacacatcgcttacaatgacttacttgaggtcctcgatcaggacgagcggcccgctcggatccgactcgctcaagtggaatgcggcgtgcgagttgcctgcgagtgaagcccatttcacaggggttaaacatgcgcatctcggtgcgagctttcgatgcggaccaaagccgggtacgcactgacgcgggcctccttgtccaagacaaagtcgcagacggcgttgcggccgatcttgaacgtcggtttgccgtagctgaggacgagcggctcgctcgatttctggccgagtggaatcaggcgaccccctggggttggagcggagagtgaggcggtcagtgccggtgagcgagagtgggagagaggatgcgggtgcggcgattgggtcggctgcgcggcgagcatcacagcgcgaagtcgaccgtcgggcgccggaaggcagctcggagggaggcaaccgaccctcgcaccaacccaatgcgaccgagacagtgctgattgatggctagagcccggctgacggagcgaccagtgctgccccagacggctgggtggcgtcgctcggcatgacccaaacaatagcgacgcggcgagctcggtcgtccagaccgagcagccttgtcaacgcaggcggcttgcccagccctctacagcactgttcggctgagaagattctcgagagacgcgaggacaggcggaagcggacggcactagtcgaagggccaacccctgagaggcagagccggaagcttgcgattcggctcacgccggtccagagctcggtcgcgagagccgccgcttcgcccgaaacccaccgacaccgaaaggcagcaagaccggcgcaggtactcacagtggtcgggctccccttgctgagtgccgttcggcaggctctgaggctgcgtcgccggtccggtctgggttgcctcaaagaggtcgtcgtctgggtggccgccgaagccgccggcgccgtgagcaaagacgtcgaactcggcgtcgtcgagcggcggctggaggccgagagaggacgaggccgggtcgagcatggtcgagttgctgctgctgtcgtggggtcggtcgagctgctggtcgtccgtctcgcgcgtgcgttgggcggagatctcaggcgcgcgcgaagctcgacgcgtgggagcagcggccgtccggcgagatgcatcacacaggaaatgggagatctcttgaatgagtgtttctcgagcaacaagagtaggttgccgacatggaagacaagtctagctattgctcagttgtggtacagaaattggagttcgctttgagagccttgcgctgccgaaagagggttagtaaacgacactgctcgacaggccgacacttcaccttgacaacacatctgctcgccgatagatctgagcccgtcgcgaccactgacaccactgcacgagcgcgacgagcgacatttcaaagtaacaccctagatcgtattgattccttgctgtcggctcggccggctctcgcagacctacatgttcaacctgtctctctgcatcactgcgttgtcggccggtcctggccgatgctcctgttcgtcctttcgacttctcttccgcccgacttccatcatcgactcgcttcatctttctctttctctttctctgcaacaccatggctcccttcaagattgttgtgctcaagggcgacggcattggtgcgtgcgtgcctgaccgcccgcccgggcgtcatcgcgctgaccgctcccgcctgtccatctcttcctcctcgtcatcccaggccccgaggtcgtcaaccaggcgacgcgcgtgctcgggacgcttctcgcaaagacgcccgagctcgagctcgagctggccgagcacgacttcggcggcatcgccatcgacaaccacggcgagccgctgcccaagtcgacgctcgacgcctgccttgcggccgatgccatccttatgggtcagtcccgttggccttagacttagactggctctggattcgtgctgatgctcagactctcaacttgcctactgtcaggctccgtcggcggacctaagtggggcgtcggtcccgtccggcccgagcagggcctcctcaagctgcgcaaggagctcggcctctacgccaacatccgaccggccaactttgcgagcgagagcctcctccggcactcgcccctcaaggaggaggttgccaagggctttgacatggtcgtcgtccgtgaggtgagccgctcttcggtgcctgtcttgacgtcgacggtcgactttgcgcgcgcgcgcgcgcggcctctcttgctgaactcgagcatcgacgctgacccgctcgctttcaccctccgccagctgatcggcggcgtctactttggcgagcggcaggagacggacgccaacggcgtcgcatgggacacgaccctgtactctgtctccgaggtcgagcgcatcacccgggtcgcgtgcgagattgcgatggcctcgagcccgcccctgccggtccactcgatcgacaaggcgaacgtgcttgcgacctcgcggctctggcgcaagacggtgaccgacctcgtcgcaaaggactaccccgagatccagctcgaccaccagctcgtcgacagcgcggccatggtcatggtctcaaacccgcgcaagctcaacggcgtcatcttgaccgagaacatgtttggcgacatgtgcgtcgccgcgctctcttcttctcctcgttgtgaggcccacttgctgacccttagcccgttctattgtcccagcctgtcggacgagtcgtcggtcatcccgggctcgctcggcctcctgccctcggcttcgctcgccggcgtcccgtcgtcaacaaagacgacgatgggcctctacgagcccatccacggctcggcgcccgacattgccggccaggacatcgccaacccgatcgggacgatcctctcggccgcgatgatgctcgagtactcgctcggccggccgaaggaggccgagctcatcaagcaggctgtcaagaatgtcctcgacgccgacctccgcacgcgcgacctcggcggcaagagcggtaccaaggagatgggcgacaacatcgtcgccgcgctcgagcagctcctctaaaacactgtgttactagccacccggttctcctaatcgcatgcttgtaatttgctgaacggtcattcgagagtggatcagaactggacgtcgatccgggcattggccgtccgggcggtgagcgagcccttccccttgccaccactggtcgtaagacggtcgcccttgacctgcgagcctgccctggcgccgatgtggacgcgctcgccgacgacgtcaatgccggcattcgacgtcccgagcgtgaatgcgccggcaaagtcgggagcgacgatgcgcatccgctcgtttgtcgtcgaggcctcgatcttgagcgccgatgccgcggcctggccttgagcagaagcgaccgtgagctcgagcacgccgttcgtcgtctgggccgagatgggcacgacgtcgagcgccttcaggccgagctcgaccaaggccgtcaagcggtcgttggtcgtttgaagcgaggcgctgcgcgtgacggatccgaacgaggcagagataacgccgttggtcgtcctggccttgacctcgttggcggcccactgccccttgatgccggctgatataggaagaaggaattgggtgagcaacgtcgtcaagtcagagctcagctcaagagaagcgcaccgtttgtcgtctcgatcgtcagcttgctgagaagtttgtgcttgactggctgcgtctcgccagcccagcccagaacagcaccgcttgtactcttgatcgtcagcaggtcgctgacctcgacgtgcgcggtcgacaggttgacctggccgttcgtcgtcttgaaggtcgcctgcttggcccggaggccgacgcgttgagagaggttggcagtgtcaccgagcatgctgatgcgcgcgtttgtcgtcgtcagtttgaccgtctcggcctcgagcgtctgcggagggtggggtgcgggcgaggtcagcctggagcgtgctgcctggtttcagtcacatgcgccgacaggacacacggaaaagtcgatgtgcgagctgcgcgtcgtgtagtcgaacgagcggtacgacggttcttgctggtcgccctcaacccggagcgacattgtcgtcgtcatgccctcaaagtcaagtgccttggcgtcggccggtacgcgcagaacgacctggaagcggatgtagtccgtccggctgcggtagttgatgccgtgcatgcgaggagtctgcgagacagaagatctgaggtcagcgctttggcatccgaagcatccgctgcgcccgactgaccatgatgtcgacgccgtgtcggtccttgccgtcgacgacctcccagacgcgaacgcgctccttgagcttgtcctcgtcggcgtagatgaccgagacctcgacgtcgacgacgctctctttcgccaatggcttgctgacgatcgtcacgctgccgacggcgtcctcgccaaaggcgtggaggaagaaggccggctcgctcgccgcgagcgggaggtgaaaggtcgcgttccggacgtgaagcggcgtgccagggtacgaaggatgatcgtgctcgtgccagtcgggatgcgtccagtctggtagcgtgttggggtttggcaagggtcggcctcgggtgtcattggcaggagggaacatctggcaggaggcgcagctccaaaggggtaagctcgggagcgagatttcaaacgagttggccgttgcctcctttacccattcctcttcactgccctcgcccgaatttggcgtaccctctcgggcggtctgcgagaaaaggacggttccggcggtcgccagtgcaccagcgaccagagcgagcatgatgaggccccagcggcggttgatgggcttgcacttgcgtgagctgccggcttgcggggcggtctcttcgacgtccgaggcacgccggccgtcggtgtaggcgggcgggaggagcggcgacgactcgtcggcgactgggtgctggtgcgcgtgctgatgctggacgtcgaggggaggcgaaggaagcaaggtcgaagcggtcgaggctgcctggcgcgcctgcagcttgtcgtcggaggtcgggtcgatcaggatggccatctgggttgctgtcaaggtcaggactcagaggctggtcgttagtagactgcccgtcctcgctgcccaagccttttgagcggcatcaagctcgagcgagacgaggcgaggctgcacatggtccgggcgagctcgcgaaccgacgcagtcgctcgagcgacctgtttggtcaacccccttcgatctaattccggcctcttcttcgacctcgcttgctcgctggcgtgcgtgggatgagagcgcgagactcgccgagggtcgaggagtcggaattcggagtcgagcaagttggagggaggaaaggattgagcgacgtgacgtgtaagggttgtcgacaggtcgatgcgcagcacgagtccgggcaggcagcgggacgacaggcaccctgctctcgacgacagctcgatcaagaagggctagtgcgctcctggcagataatttgttctggttcatggttttaaaggacgcccgagagtagggctcacgagaaggagcgggttgtggtctgctgagggcgagacggcttgagatgaaggcggcaacagttccgctcgcctcctcccggccatcacagtcgccatctcgcctacctgccgcctcgacgggcttcattaaccctttgcccggcgcatgtcggacgctcgctcgcggtcgagctctggcgagcctccctcgccaccgcccgagacccactacgttcccacacggccctcggtccaatcagccgagcctcgcacgtcggcccaacctcgctcgctcggctgtgagccctcgtccaaggcatcctcccaaagacccgtagctgaacagcgccctcccgcttccaggccgcccgcgtcttcgccatcccggaacttcgcgatcttatcttcgagtcagcaacgcccgctgcccctgtgaaccatcaccttgccggccgactcgcctacctcggcagcctccatcctcggcctaggcccatgccagatcctcgcttgcagccgagattcagcgaccctctctcgtcgccacccgagaatcaggacgtacctgctcagcttccggtcgcgtcggctgagcccggctacctcgcccgctcggcagtgagctctcgtctgactctgaggcatcctcgtccgtgacgtcgactgaccatcgtatgctcaactcggcgctgcaggcaagcagaccgtgacttcgccaagcgagctccaataacctcatgcctccttctggccggccgacgagctcttcgacgccgcgctgccccggacgagccgagccttcggcgacgccatcgtccctcgcctctaccgaatgctggacctcgtcagcatacctcgccggcgcgcctgctccagggctgctaggtggtaggcctctatcgtgacatggctcgccacgaccgggggcctccggctcagcttccatgtgcccgcaaccgaggacgcgggacgggtcgacgaccgacgaggtcctgcgcatcatgctcaagagctcgcgccacaataacatcacctccttctcttttggacagcaaaataccatacgtcaccagcgtcacatacagcaccggcccgacggacgaccagagggacctgtggccgtcgcactcagactcttgcgttcatgcccgcccctgtgctgactcttgctgacccaagacttcctcgctggcagttcttactccaagcggaggtagattctcgaccagagtctactctcatcttcagctcctgtgatttctccaacccctccggccgccgtcgtcgtcgtcgtcgtcgccaggcgcaatttgcagcaggccctgcttttcgcgacctggacgctcgcgccgttggcgatccctcaatcggccctcctgcccgagctagagctcgccctcaccctgcccaccctcgcgctgctcgtcttcctgcctccaggcccccacccgacggccgagattgaggcactcctctcgcctgcacaccgtgcccgcgtcggccaggaggccaaactggtcctgcttgtgcgtcgagcgcaacaagctcggcggcatgatgcgcatccctagctggggctggggcgagtcgaagctcgaggaggccggccgggccatcccgcgggtcgacggcgtctggcgcgagtgatccggcgaggctgcgcgcggctcaatattgtacctcgccacacccccttttgattcgacatcatgactaacctccgcaaaagccgggcgaccgcccgccgacagggtcatgctggttagtcgtcatcatcctcgggcgccggtcgctgatgccgtcgtttcgttccgtccgtttccggccttagtcaggcgcgcagcaaccggaaatgcacggaacggccttcgatgccttccttaaagaagctcggacgctacgacgtcaggctcccttcgtctcccatctcaccctcctctgcgccagctctcctacctctccccatcttcaccatccaggtcatgtccaaccgccagcagactgtctaccggctcgagaagcaagccgacggcacgcgcatcgcccggtctcgctcggagccgatcccagagccgtcgccgctcgaaattgtgttcgaggtcaaggccgttgcgctcaactaacgcgacattgcgatgcagattgatacgtacccgtttgatgtgaagaacgacgtcgttccttgctcggacgccagcgggcgcatcaccgccgtcggctcagccgtcaccgatcttgctgtcggggacgccgtcgtcgtcctcttcgacccgtcggccctctacctggggaaccgcgcgccctcgcatgcctacggagggtccacagacggcttccttcgcaagtacgccgccgtccccgcgacagccgtcgtcaagatcccaacaacggcggccgacgaagagctcgactatccggcgctagcctcgctcgtctgcgccggtgcgaccgcatggaattgcctcttcggcccggtgccgaccaagcctggccaggtggtcctcgtccaaggtgcgactctggcctactgggatcatcgcaaacacgcaggctgaccttcctatgcgcgctcgtcaggcaccggcggcgtctccatctcggccctcaccctcgcaaaggcgatggggtgcaccgtcatcgtcaccagctcgtcggacgacaagctcgagctcgccaagaagatgggcgccgaccatggcatcaactaccgtacgacgcccgattgggcggccgaggcccgcaagctgacgggcggcgagggcgtcgacctcgtcattgacaacggcgggagtggcgagatcgaacgctcgctcggcgccatccggttcttcggctcagtcgccctcgtcggcttcctctcccccgcaaagaagatgcccgacgtcgccatgggcattctgacgaagggtgcctttgtccgcggcatcacgccgggcagcaagacggaactcgacgacctcgtccgcttcattaccgcgcgcaagctcaagctccgcgtcgaccgcgtctattccttcgacgacgcgctcaaggcctttgagtacctgaagagcggctcccagatcggcaaggtctgcatcgagatgtaatgccatgatcgtccccgtaatgcccccgtgacagcgacttggcgctcagcgaagcaagcaccgcgttagagactgggaagcagactcaggtcgaaggatccaaccggaagcgaggaccagtccatctcgagaagcgctttgacgtctgccggccagccagcgaggaccgactcgtacgaggggtcgctgggaggagctgcctgatcgccgtgtcggacggcgaggttgccgctcggagccgggtcggtcgtcgacggcgaagccgaccagccttccaagccagcgacagcgacgccccgctcggcacccagacgcgaaagcacccgatggtaggcccgcgtcgtcggtagaggatgccgttcggggtcgagcaggtcgaggcaggccgcgaagaggcggtacgcttcctcggccttcttgagctggcgctgccgtcgcgcatgagctgtcgcgaggagcgcggtcgtcgccgcggccgagatggcctgcataggaaaaagcgttgtgaacggcggatcggatccaccctccgaaagctgagcaacgatgtgagggttagtagggagcgaggcatgaggagggcaacagtgaaaggactgacgcgcatcagagagacgatccggttcgcggcactggtgcatcgccgggaggacagctggcagtgatctgtgtcgagcatgtcctcatccagaaaccacgagcggtgcaaaaagatgacaagaaattggtgcaagaggttgagcagtagaatgttgtgcggcggcggcgtcttggtctgtggcgaaagacgcagtgcgaccggcagcgatgcgagccagtcctcaagatcgacgctgcgacagtcggcagagtcagtcatagcattggcgaatgaaggcccatttgcctccagcggatgtgcgtacaagatggccgcagcttctgccatcgtatctggcaagctcgtatcgacattttgaccgcagctgccgtatggcgcgtcaggtttggatcgatagagaggcagagggacagcaatgacgcacatggtttgaaagatgcgactctcgatcaccgagagccgtgcgagccagtggaatgctgtcgaccggaggtgagcagaactgactgaggccggttccgtctcgatcaagggccagtcggagtcctgaatagagacgggagggagcatcggctggcggcccatcgaggtcacaaagcgtctgcggtaggagaagtagagccaggttggtgagcgagacgccgtccgacaaacccaagaggccagacggacttgtcaatgacaaaacaagcccaataggtccgcgaccgggcgtggcgcacagcttcctgcgagccatcgagtggcgctgccagcccgccgccaggcccgaggccgagcttccgacacgtctgcatggcaaaacggcgaaagatgtcggccaaagacgagcggccggccgacgtgtgatggtggccgaggatgaggagcccctggaccgtcgccagagctggctgctcggcctcgttctcgagcgccgtctgagcctgagcggttagacggctgatgacggccggatcgtgcgcgcgcggatcggcgctccgctggcagccgagggcgaggagggcgaggtgcaaaaacggcgaatacgcgtatgtccgacccgacgggctctcgctcaagcagtgcgccatgtcgcgacggaaggcggcctcgtcgacgatgcagtagcagctgcgagtgcaaggtcagtcagcgagcggctggaggacaagcagaccccggcggcccgtcgcgggccaacctgttgtagctcgaggtacaactcaggacgtggtggtgcagcgcgtcgtcccaattggcgaggtctagactgcgatgaggcagtcgggatctccagtcgatcatgccgtccggcgcccgttccgggtcgggaaggccgcttgcggctgggtccctctcgagggctgacgcggccgtcgcgtctgggcgagactggcagctcaaccaaggctcgaacagcagagcttgcgagacattcgcatcctacccggaaagagcggcttcagcaatgagagtccagatctgcagcgaccttgatcgcaccttcgagccacctgcgactagcccattcgagacgtcgtccccggcaccagtcgagcggctcggcctcgagatcgtaccggagcctcgccggtcggtgccatccaacaaggcctccagcgaccgaacgcgctcctcgagcagcttggtgcgatcctcgagcgcgagaacgtactccttcgaccggaccgttcgcttgtcgccgccctcagcgtaactgcaagcgtcgccgtgtcgcgcacagaccgctgcaagacgggaccggaggcgcgtctattcagcgacaacggccctctgacttcggcgacatataggcaagacacacagcaactcggacttgctccgtcgcactttgtccttctagagcggcaaccctccgcggtcagcccgacaggtctcggccagcgaccactcgcaggtcatcgggcgacgcacctccgcttgcactgctggcatgcccgcttggtatactggccgcgcttggtgcttgaggatgccgggttggtctcttcggatcgcgacggcggcatggtgatggtgatgtgtcgagcgaacgagatggcaggcggcgaggtcgtgtcggcctagcgccacctccagtgccgagccccgagcctggcgctactgcagcaggctgcttgcgcagacccccggccctcagccccagtcctaagcctcgtccctccgacctcgtaccatggccagccctatcccagccgccagctgcgcagtcttcatcccgctcgaagagcagagatcggaggacctcgccttcatgcgtctcgctctcgaccaggtgcgacctgccctgggtgcatgctgcctggccgagcgtcggagctgacctcaagctattgcacgtcctcaggccgaggaagctctggccgccaacgaggtgcctgtcggctgtgtctttgtcagggacggcagcgtgatcgctgcggcccgcaaccgaaccaacgagtggcggaacgtgagctcggtctgtctctacgaggggatgctccccggcagctgacgcctttccgcgcgcaggccactctgcatgccgagctcgtctcgctcgaccggatcctgcccctgacgccggcgccgcttcacgacgtgacgctgtacgtgacggtcgagccctgcgtcatgtgtgcgagcgccctccgccaggtcggcatcggcagggtcgtctacggcgcgggcaacgaccgctttggcggctgcggcagcgtcctctgcgtcaactcgcagtgcgtcctctcccgccctgaacctcaggtcctcttcagttcgctgatacctactctgtagagagaacctcgactcgcacgccccatacgaggccgtcggcggctactttcgcgaggaggccatcatggccctccgccggttctacatgatcgagaacacgaatggtgcgtgtattcgtcgagcagcactcgccagccggcccgagactcatcaccgtccttctcccgactgttgccacagcacccaagccccgcaagaaggcaacgcgcgtgctcaagactgacattctgccgacacatgccgggtcgtcggctgcactggcgacgccggacgagccgctggcttaaccccggcagccgaaggttcttcgttcaaggccatgcatcatcgtgcggccgtgatcccggcccagtaggcggcgtcgtcgcccccgcgcccgacgaccgccttgcagacggcctcgctcagcttccgagccgcctcctcgtcggcgctctcgagcgccgtccgcgcgacgtcgagcgccagccggcggacgtcgacgtctgggagggccgcccaggggccgggcacatcgcctcgcgttgaatgggttgagtggaagaacggtggcagagatacgagaaggattggcgtcagaccggcagaggtcactggcgccagcaggagcgagtggacgaggcggagcagggtctgcgggaaaatcagccggcgagtcagtcgggctgcgcgtttgtcctgagcatgccagttgcaactctgcacgtaccgtcgttccagataggtcttttgaccgcagctcccacagcatccgcggcaggctagcgtagaatttctcgacccgcggcctgctggcgtcgttcaggcgaaagaggccggtgtagagcggctgcgtttcgagctgcagtgacgatggataggatcagcgcctggcggtcggcagactgatgactgccactcaccagacacaggcggccgataaactcgagcgcgagcttcttgaccggatcggtgctgaagagccgaagatagtggtcgacgagtgccgcccagacgaggcccgggacgtcgaccggctcgtcatcggcgtccatgtcggctgccttcttggtgctcggcggtgggagcgagaggagcgcccagacgcactcgcggatgtcgaggtatgactcgcgcgagacgttgacgccaagcggagaagcgagcgtcgaccgcttgcccgagaggagcgcggcgacccactcggccacctcctcaacgccccggcgcttaccctcgctgacgccccgccgagcgcggcggaaggcctcctcgagcgcctttgcccggtcctttggcccgtccgactttgtccgcggcgggaccgagacagcactcattccgggcgcaaggagcgacgtcaagctcgcatagtcgagctccatcttgacgagcagggcctcgtcgcggctcgagcgcgtctcgaacgtcttctccgagaaaggaaagtagggccgcatgtgcttgagcatgacctcgagcgccgaccggagcgccggcgtctggccgttggcggggttacgaagtgccgtcaggccgagcaggctgcagaacgagaggatcgatgagagcgtctggaggtggacgtccatcgaggcggtcgagcctgtcggcgccgagggcaagaaggctgagggggctgagtcgagaaaggtcgacaggaggagcgggtgcagcgcgaggtacagctcctgaacggcgggaaggaggctggggtcagcgggggtctccgggttgaagcagacctgcgcagggctcacggtgatcttgcggcccttgtcgacttcgccactgttcgacccggcaccgccggcgagctcaaggtcgccgcgctcccatccgccgaggccgattgcccattcacccgcgcgcgctttgcccttacctgccccgacggcagctgaagaagatgatgcggctgacgaggacgaggcctcgagcgaggtggcgaactgttcgaacgcctggggcgttgcgaacgacggtgcgaggaagccgaaagctgaggtgcgcgacgtcgacgagggcgtgcgcgaccggtcggcaagggcgtgtgtgaggaacttgagcagcgcctggaagacgacgagcttggactgtgatagcggttccaagggtcaattcctgagtgcctggtcacgccgaacaaaatgcgcagacgtacggcagtcccgagcggtgcattcgagccggccgtctcgccctttccgccgacgccaaggacggcaaggagaccctcgagcacgcggccgccctcgccacgaccgccagaacccgtctcccagccatcggcgatccggtcgcagcctgcgccgccttcgtcgagaagggtgccgagcacgcggacggcatcgacccgaacggccgggaagatggacgacagggccgatgtcgagtggaggaggaggacgggcaggtgcggcgcgagtgtcgacgtcggcacgagcggcaggacggcagagagcagaggcggcaggagcgtccggaccgaggcctcggcgtcggtcagcgtcttgcagacggcctggatcagcgccgggaactgggccgtgcgcaggtcggggtaggcgagcaggagctccttcatgccgttgatcgagtctgcgagcaaagacagcgccgactgcgatcagtctcccagccaagcgtgaagcagcgacgaaggtgcgcacctcgccggatggcgacgttgtagtgccggctgccgaccctcagctcctcccaggtcttgccgcccttcgtcaggcgctctccctcgtcatgaacgacaccgatcgactggttcggaagcgcaatcgatcgggccttgtacgacgtgtcggtcgcattctgggcgacttgcttgcctttgccgagcttggtcttgactttctggaagagccggaacagagcgcgcgggtcaaggtggtcagcaagctcgctcgctcgaccgcccgcaccccgagctgagcaagggacgaaccgcaaagtcggcgaccttctgcttgtttgggttcggcgccgtcggcttgaacttgcgcggagcgtccttgggcatggctaggcaacagaaggctagtcgacgtcggggagggcaacggcggctgaaattcggcgggcggtcggctgcgcctaagccgacgctcctccctccggaccatgacctcgagctcgacggcagactaggcaagatccagtagcatcagcattgttctagccgaccattgccattatgggcttcacgcagcggctgaagtcgttcttcatcgtcccgacctcgctcttcaccttccgctcgcccgacccgaaccagacgatcgcggccggcctccgccggcgccggccggtcctgctgtcgtggttcctcctgtcgtgcgttgctggcgccctcgccgacgccaagcgccgtctcgcagccgaccgggcggccgtcgaccgcaagatccggtgcctcgaggagctcatcgccgaggagcgcgacgtgcggccgggcgcgcgcgagcagacgcgcaagcgacttcgggcggtcgggctcgtcaggcgcgaggaccaggagctctgggcgagtgagcagggcgagcaggccaagctcgaggacgcgcgacgggctaagctcggcttctggaagcggtactttggcagtagggccgctgaggacgaggcagaggtgcgtctctctcgggacctggcacgtgacgtcgacctgctgaccgtttcccttcgctgacgcctacagggaggcaatagtgagctcagacgtgcgtcaatctgccctgtgtcagaacagcaagtccgaatactgatgcccgaatctgctcctttcgctgcagcgcaagacatagccgacctcgccgctgccttctcctcgaccccgtccgagtcagcatcgccgtcaagccggccggcagcggcagaagcgccaacatcgacagcatcaacagcgttgcctgttcctgctctgccgtctccggcaaccggacgacgaccggctcaggacgacgccgtacctgcgcgggtcgaatttgttccggcagagaagcgggcagactgggcgaagcgcaactttgtgtagcgctcgatgggggcgagccaggacagtcgatttacttgagttctgacatgactcgctcgtcacttcaagtcgtgggggacagccttgggaggacgcattgctcgcgagtcgaagaatgcgcagcgaacaggagcgcgtcgtcggccgccgctccttccgacctaccgaccgaccgacagccatcccgttcgtccgtccaccagccctgcccaacagcccagacagctcgttttacctccagacacgctcttaccgccagaaaccatgaaccgccgcgtctcgagccgcccgtcgacgctcgaccgcccgttcgtccggctcatcgccagctcggccacagcgacgacgaagctcaggcgcgctgactttctcctcgactcggttcaggcacaacaagacgcttcggtcagaggtctcagcctcggcgatgggcttcctaatgagcgagatggtctcgtacgctcagacgcgggtagactcgatctcggatctcgagggtcggtgagtgctaccctgaacccggctcgaccatcgccacgcctcgcgcgcactgagctgatcactcccctgctgggcagtttgagctcgcttggccaccaggtcggcctccggatcctcagtttgctgctcctgcggaacatctacggcaacgcttcgagcttgaaggtgcggccatgagaccttgagcttgttcggcctgtcgctgtctagcggcgcagctgatgaccatcgcctcctcttccgctcggacgcaggatcccaagagggagcaccgcctcgtgccgacgctccagttcatccacacgcaggtctaccgcgcagcgttcggccagccagcagactcgctcgaaaagtcgtttggcggggaagacgagtgtgcatcgcgcaggagactgccgcccgtccttgctgtgcctcccagctgacgagcgctaccctccctgccgacgtgtcgacatgccagacatgatcgcgctcaacagcccgatattgacgcaacacatctcgatcccaaaggacatgagctctctctcgtgcgaggcctttaccgccggcgtcgtcgagggcgtcctcgacgggctcgactttgtgcgtcgttgcatttgcctgaccagaagcggaccgccgactatgctgacattcgctgcccatttctctttgcgcgctcttacagccggcaaaggtgacggcgcacgaggtcccgaccgagcagcaccctcggcggagcgtcgtcctcatcaagctcagccagcgcgtcatggagcgcgaagaagagttcaatgccaagcggtagagccgcttcatcgctggctggtcggtctagatcgtatggccggtttgtacgagcatccaggggtggccgtcgagagccaagacgagcgcggcgtatccgcagcgagtcatctgccgggggtacatcccggtgtagcttgagggcgcgcctgtatccagcgtattgaggtggaccacaagctggcgctctaaccaccaaaactatacaatcctttgtcgtgaccgaagtctgccgaaacagggacaggggctgcagctcatccgaatctgaacgcagcgcgcagccaatgaacggccggcgtctgggcagtcaaggtgagcacgcctcgtcaacagccggctaccatctactggattgagcctgcgcccgatgcggcgacgtgggtgtcgatctgtagggctgtcgccgactcctcgcacgctgacagatggcgcactttggtgatccaagttcgtcagtaaaaggcaccttccactacggcaactgcaacgaggggctcggccccgcctgggacatctcgagctgcgtcagcgacggcttctgcgatgcgtccctcccttcgttctccttgcccgcgcaggtccaatctgagcgacgtctggctgacctcgaagtctcgtcttcgctgcgctagacccagagtgctgttaagaacaagtgttcaggtctggacggctggcctcggtcatcatgacttgagcgaggccataccattgctcctgacgctcactcttctgttgattcgccgcagatccaagtctgggctccatcaggaacgacggacctaggcagaacatggccactctgccccgctccccctttttgcctctcgcggaagcatgctttatatacgctgctttcgatccgagttgcatcaagtctttcacgacaaaggattgtatagtttaggtggttagagcgccagcttgtggtccacctcaatacgctggatacccgtgttcgagtcacggtacgatcactttttgacgatggctcgtcttgtcaatgtttgccctttttccactggctcttgatctgtgcctcgatccatcttcccttggttaatctgcctcttccacatcactgcaaatttcaacctttagtcctgcaactcgtctgccagagacaagccctctgcgttatactactggcttgagccctgcgattcgtcgcaggctttccgcaccctgcccttgctgagatatcgctcaaatgttccacagattccaattccttacgtaccagccctttggtagagcttccatcgcctagtgctcgcgacccgatcagcccaatgaaggcgggcgcgactggcggagtcgagctgcgcgcgggtgaagaaagaaaatgtcaattctggctcgcagcaagcagggaggcagctgcctgcgcccaagctcgtctggccttacccctcgcacggcaccacctcgaccccctccgacacctcagcagactctcccagcaggcagaaccagcgctagcagtctccctgacctctcaagagtccaccactagcgccgccgctcgagccttcaggcacccaccccggcccccgcagccggttcctccgtcgccgctgccctcccgcagctcgcctctcgggctctcctctctccctctccaagctcagctcgccgccggaccttcagtcagtagcctcgctcatcatcagcagccatgcagtcggacgacgtcatctggtcggtcatcaacgcccaattctgctcgtacaaggtcaagtgcgtgcgcgtcgaccgctcgagctcgaggcaggctctgctcaaaggcccgctcgctgaccacatgcgcttgcttctcgccgcttacccctcgaccgactccactcggctcaccaggacgacgacgcagaacttctgccgaaacgagtacaacgtcaccggcttctgcaaccggcagtcgtgtccgctcgccaactcgcgctatgcgaccgtccgcgagaaggagggtgcgttgccggccttccattccatgctcgacttccggccgggacatcgagctgatctcccgctctctcgttttgctgcaggcgtcgcctacctctacgtcaagacgattgagcgcgcacactcgccagccaagatgtgggagaagatcaagctgtcgaacaactacaccaaggcgatcgagcaggtgcgtcgtcccttggtcgctgttggacgcctaggcgcaagggcagaggctgatggcttcgttgtctgatcttttcttctgcgtgctcctctcttgcccgcctgcctccgcctcttgcgtgtctgctgctctccgcgctgtgtcctcttgtgcgcgacctcgccatcctcagatcgacgccgagctccagtactggccgaacttcacggtccacaagtgcaagcagcgtatcactaagatcacgcaatacttgatcaagatgcgcaagctcgccaacacgcagcagtgtgtcccattgctcgcagccgctccagctcggtggctcacggcgctgacatgcgctcttacccacctcgcaggcccacgctcgtcggcgtcaagaagaagctcgatcggcgcgagcgcgtgcgcgaggccaaggcactctcggcggccaagctcgagcggtcgatcgaagccgagctgctcgcacggctcaagtcgaaagcgtacggcgacatgccgctcaacgtcaacgaggacgtctgggcggccgtcctcgagcgggaccggctcggcgaggagggcgaggagctcgaggacgagggtgaggaggaagaggaggtcgagtatgacgaggacgaggacgaggacgggctcgaggagagcgaggaggagcgcgggtttgtcgaggacgactctgaaattgaggagagcgacgacgaggacgacatggaggacttcagcggcgaggaggtgagtcgttttgcgcgggccgcttcacatccctctgactcctgtcctccacccgctgattgtttctctccctatccgaatcacccttgcagtaccgctcatcggagtttgactcggacgaggaggatggctctggctccgaggccgacgaggcctacccgacgtcggccccgaccgtcacgaagcggcccgcaccgtcctccggcgcggcggcggcccggccaaagaaggcgccgaagaagagcggcggcagcggcccgcgggtcgagattgagtacgagcacgagacggagacagcgccgatgaccaaggagctcctgcgcgactggtaagccgtcgaccgacccatacccccgagggacggatttgcatggctcgtccttctgtacccggcgtctgctttgcgcgagagagagaggcttgcgaagggctgctcgtgcgcgagaggaaagcgtcctcgcctcagtcgattgtccgtcgtggcgtttctggccgagcaggtgcaggtgcacgtccatgtcaccggccggctgcttttaggccagtttcgtccggggcgaccgcgcagcaggccagcaggcaggtcgccgggcaatgccagcccggccgcgagaaaagacgcagcaggaaggaagggctcaccggttaaagctactttcaactgtctagcgcttcagcgccggctgctgctcgtactctcagggtcgcgacagtctggacagtcgtgcacgtctgcagcttttggttaggtcacgccgccgttttgacagggccatcggcagggctgaataccgccggcgcccgcgcgtccgaagctgaaggagcgcctgctttggctctccaccttcgaccgtcgccctttcgccttacggaccaagaccccctcttcttgtgctcgctgtcggtccttctactctcatccagtctccctgcctgctgctcctagagagagagagagagagagagagagaaaaagaagaggacggcccttcgtttctgccggtacgtctcgccactcgacatctctcctctcctctccctccgaagctctgctgtcggtgcatcggtcgggcttctcacctacaacgaccacttgttcgcgtccgaaggagcatctagactgacctgctccaacttcgccctcgcttgcgctcgtcggcagctccggtccttctaacagtcgacgacgcgctagttccggcagctcgcttcccgaggagcacccgccggccgacctcgtgtttgtgagcgcctgtccgtccgtttccgcctctccccacgcctcctgcttcatgtgactgcttgctagatctccgccactctgctcttgcttctcggacgcggtctctcagtcctgccctcaccggcggtcttgaggctgtgttgctgaccttgtcatcccttgtcccgcgcgtcctcgcctcttcctctagagccgtccatgctcgcgctcgaccgttcgcacggcgcccaccaccaaccccagtcgcagctccagggcccgtcctcttcggcctcgacgaacccgtcccggccgagcatgtcgtctgcctcgcgtcggtcgagctcgcacagcggccagccgtacgaccttccgccgcggagccggtcgacgccgccgatcttgccccactcgggctcacccttcgcggccggcggcggacccaacggcggacaaaacgcctatcagcagcatcagcagcagatgcagcagtggcacgcccaccagcagcagcaacagcgccagcaatttggtggcggcgtcggctggaacccctatggcgccggcgccggtggggccggtgcgcctcagtcgcagcagcagcagcatcagcagtggacgcagcaggcgatggccggccttggctcgccacacttctttcaccagcagcagcagcagctcgctgcttgggcgtccgtctatcagcaggtccgtccgcagtcgcacagaagactcccgtccatcgccgatcgactgaccgatacatttcactatttcccccctcttctcacaaacagcaactgatgcggtcaggttcgtcgccgtccttgcccttcccgaacaacaatggcggtggctcgccctatggccacccggccgactttggcccgccgtcgcacatccaggacccagcccgccggcggacgacgtctggtccgcagcagcagcaacagcagtcgcagcggtcagcgtcggccgacctgtcgtcctactttcctcagccgagcgggagcaacgccaacgctgccaccgccgccgctgctgctcacgcccggcacaactcgtactcgaccgcgcagcagccccacacgtcgcagacgcgacagcagcagcagcagcagcagcagcagcagcagcatcaacagaagcctcagcagcagcgacaagagtcgcgccagccctctccgccgacgtccgagccttcgaacggcggtcttccgccccagggcggcggcttccacccgtatcgccggccagagcgcaagccggtgccctctgtctcgaccgcctcgccgcgcgattcgccgacgccttccgccgccaatgggtctgacgacctcggccggccgacccggccgtacgctcggacagccgatgacgctcggtccgacacgagcgtcagctcgcgctcatcggccccgcgccagaagtctgaccgcgaacgccagcaggcccaggtcgcgacccagccagccaaggcacgcgggccaaacgcaccgccggctgactcgcacgcccgcggcccttcgctctcatcctcgtccgcttcgaacggctctatctcgtccctgggcgcggtcgtcagccctccacgtcagcagcagcaagcggcaaccgccgatggctcgggcagatcgtctgcaaactcctcgagcacgcagggtggctcgcctcctcgcgcgcagggtgcgcaggccggaggcaagccgctcgcaaagccgagcccgctctcgcagtcgcaggcgcagaacgagcccgttcgacagccagcggcgccgaccgcggtgaagccagcgcaggcgccggcaccagtcgcttccgtcgccccgccggctgcaccagagaaggctaagaaaggcttcatgggcaagcttaagggcaaaggtaaggcactgtcaaccgagcccgggtcaaaggccaacccgctcatccgcaacgtctcgggcccggcaaccgtcgccggactgacctccgactctttcgccgccggccaaccgacgtcgccggacgacgcgacctttgccgccgccggcgacgggccgggcaagcgaggcggcctaaagcggacgcgtagcctctttaacatgaagaacgcgagcaccgacaacatcagtatcgcgagcgccgcgagcagcgcgagcatgatgatccgcaagatcggctcgttcggcaagctcgcgtcacgcaacaggtgcgtgttcatctgctgctaatctgctcctttgcgccgctcgctgacgacctggttacaatcccgcttgcagcatttcgggcatctccaacatcttcaaggacaagaagagcaaggagctcgacgaccttgacggcccgggcgccgagaagaaaaagggcgggctctctgccttccggagccgcaagtctgcgccgtcggcggcggccaccgcccatgcgagtgccgagctcgaccgcccggccgccgacactgcgtcgggcctgacgccggcggcccggctcgctcggcagcacacgatcaagagcaaggcggccgacgaggccgaggacgagcgtcggcgatcgaccatcggcgacgtcacggaggatggccggcggccgtcgctcgacgttccaacagcatgggagtcgacgaccgcgacccagcagacgaacggccggcagcccgtccagctcgtcgacgatggcttctccgacagcgacgaggacgacagccggtcgctcgatgttgacgatgtggcggaccgacttgctggcgctgggatcgacgaccgtgcggtggacgagtacgccgactggggcacgtaccctgtcgcgacgccgccgacgacgcctcggagcatcctcaagcgtacgtcctttgtcgtccgggtcgcttcctttgaggctgctactgacctgcctgtctcacagagcactcgtcgtacggctcggcggcggagctcgagcctcctcagcccgcttggacgcggatgcgctcaaactcgtccgatcagtcgatcagcgcgactgcgctcggccccaatatcctcaatgacctccagccggacgccaaccagatcgatggcgtccacccgggcgacctccaccaggcgcacgtcgactcgccgacaagcggcgccgcgccggccctcccgccgcttcagtcgccgaccgacgaccccttcgccgcgacgaccgacaagctctcgtttccgtaccaaaacccggcccacaactcgtcggcgccgacgctctcgctctttagcaacccgcccgtcttcaaccaccggtcggtgacggctccaccgggcaagcgcaaggaaattgcctgggcgcccaactgcgccgtctaccacacgtttcacgcgaccgagtacgaccgacgtgcgtatcctcctgccaagctggccgctctgcgctctgccctcgagccgatcctcatttgctgatccctcgtcggtctctttgtcacaggctccgaacccgcgacctgtaaccgcctgaccccggcgctcgcccaggagatcaagctctttctcaaccactacaagatggaggagatggaaatacacccggcgagcaaggcctagtgcgtgtccttgcctcctgctgcatcgttctgcctgaccctcactgaccgcatgtcctcacgactctgcagcacgcacttcttcccttaggccatcggctgcccgcgagacgatcgacggcttctcggcagacgcagcgccccaaccaaacgaccgtcgcggccggtctgggccggtctcggccggtcttatcgtccgatgagcccccttcctagacgtcctcgacggatcctgcacctgctccttcttacgctcgacccttcttacgctcgacccttctcgggcccagccggctcctctgctcgacgtcttgttcgtcaccgccgcccccttctccgcttccttcactttgtctctgtggaccaatctctcggccctcgaccctgcgaccccccttgcacacatccaccgcttcctcgtctttccgacctcacgctccgtcctttgcattcgccccttgtagcagtttccttcgacactcttcatcatcgcctctctcttaccccttcctcttcctgacgatccaaactgcatgaccgatcacagccagccgcggtcaagcaggagaagggttttctccgcaagagggtcaacaggtgaaagtcgtggatccggaatattggttggaggaaactggcaagggaaaaagctcatcgggcgggaggtcaacagcgtcgaggagcaggaagtggcgcatgcgctagtttgagacgcaggtgcctttgcggcaggtgaggccggggccaaacgtcttgacgtccgagcagctgccgaaacaaaccgggggacatcaggacgaacgagagcaaagcgggcgacggctgtcgtcgcgcgagtggccgtactcgaagcccatcgcaccagagacgtcagcaaggaggaacagagcagtcttgccgctgacaggccaggccaagcgaatagtaggagagatgtcagcgacgacaagcgatccggggatgctaggcgcaggcttggtgaggagatgcaccggcggtcgatctggccgagacgctgctggccgacagggagagcagccggggcgactcggccgacaggacgccgtgtcggcagccgccacacgacccaagctcggtcatcgtgtcgaggcactgcggagcggacgtcaacggttgaggaagggagagaaaggggtcagcggtcggctggcttcaggctgagggcagaccgggcgagcgatccgggtcgagacgcacctcgtagccgtcggccgagccctcgatgcggccagcggtaaggcccgacgggcagagcgtcgtgtcgcgctcacgcgcctgacgacgctcgctgctagctgtcgccggatctcgcgcaagctcgcacggtgaagacagcgacgacatcgtcaaagcaggtacagaagccagaaagttcgtcgatgggtctgtaaaggaaggcggcctggggaacacgtggcctgtcagcgcaatgactttgtctgaaggagactcagaaagccatgtcgatcgctcacgtaggtgcggcagaattgagcacatccttggcgtgtgaccggcgacgctggtggatcgaatagactgcctgctgcgaaggctgcaacggccgatttcaagatatgtcagtctgtgaacgactttcacatgtggcagcgcaaagcagcgcgattcgtacctcctccgcaaaaacgctcccttgaagctcgagtttgggaggtccgccgggcatgaagccgccgtccggtcatcgacgctgcagcgcggaccggtgtagctataggccacagactggccggcgacaggcgagacgaggctcgtcgcggcgagtgcggcgagggcgaggctgaaaggcgagcagagcttttcggacgtcggcggctgcttgcaagacaggaaagacagcgcgagggcaagcggcaggatgtcaacgggacggcatagcaaatggagagtgaatgtggtgagctgacgtgttcttattgtttgaggaggaggcttgagctagctgttgccggcggggcgtctgcttcgtctgccgtttgtagttgagcgacagagtcagctcgcgtgaagggcgagacgaagagagaggactcacagcaagtaatgagggagttgggcggtaaggagcgcagctggaagaagttgctgggggggaaggccgtcagggaagagagcgagcggggggcctcagagctctttccctccgcgtagcctgtcgagtctcttcgcttggcgaggaaagcctttgcgaccgtgtcggcccgaccggaactgtttgtgccgagcgcaaggtggggaactagtggcgttctcgcgtacgtcctgggatgaccagtcgcatgggggtcgatcgtattccaaggctgcccagcaagacggcacgcgtcgatgggtagtcggtcccggccattcggcggtgacagagcagcgcgcccaaaaggtcgtcaggccgggcgaagcagcgtctgtcggcgagagagagagaggagcagtcgctcggctgcgaaggtcagctgcgtgcgagggtcgggctctcgagccggcggcagctgcagcatcgacacccggcttctcgcacgacgtcgcgaaggttctgctgggacgcgtctggggtctcagcccgaacgggttgggtttggcggtgcacgtcagtcgtgcgggctggaggatatggtggcgctggccaaggtggtcaggaccagctgagcgagcaccttggcctgtcgacgcacgagctcacgcctgctggtcgcgaagacagctatagtagctcacagctagggagcggatggtcggtgcgatccgagatacacagtcaggatgtcagcagaggacaagtgtcgggagaacaacatcgaggtcgggttcgacagagcagccgccgacgaactcagagcaggcaccggcgattacattaaaggcacactgccagtttcaagttgctcataaaaccgctgaccctttagctcagtggtagagcgtgagattccaaatctcaaggccgtccgttcgacccgggcaagggtctcgtttttgtccttgcttgctcggagcgagcctacttatctaacagacctggcagcggtcgacaggacatttgagacctctcggtttcatgccagacgtgtgacgttagagcgttgcaacacgcatgctcggtttgcacgaggcggctgcaggcgggtactcgtgcgctcactcctcaatcaaccgcagcagtctttgaactcgtccgccagtgcctcccagtcgagctcgacttgccaagctgtgtctgcgtgcgacggccattgattaacggcatgatggccttgctagccaagaaccgtctccccctgctccgcctcttcgctccggcccgctgtcggagccaggcgaccgtccggcataggcaggcgagccgcacagagcgcatattgacaatcccgtctacttggtcttcttggcctccttctcagcggccttgatggctgcctccgaggtgggagcctcggtcgcaggcgcggcggcaccacctgaggcaagcgagggaacgaagcgaagcggggtgcgtcagccaacgtaagctttgcaatggaggcctgtcctcgtacgacgctggccaacaagagacgcaccaaacatcgaaggggcggcgagccagggccgcttgaggtcgccctcggcggcttggcccatgagccagagcttggccggcttcgagtcatacaagcccttgacggtcatgatcgactggataaagctgcagagccaaagacgggtctatcagtcaccggccgagagaggagaaggatcgaggacgactcgggaaggggacgcacagcggctgggtatacttcatgtacaggtgaaggaagcacatcatggcgcagccaatgtagacgccccgcgtgagctttgaaatctcgccgaggtcgtagtcacggttcgttgtagtcacgagctcgccctcgccgccggactgagggaagggagcaggtgggaaggatggccagtgagcgagcggccggcgcttggcccgaaagtggacgagcgacgcaccatgggcgcggccggctggacgtatttcagcgtcgccgtgtcgttcttggccttgacctggcagcacgcgaggcaagcagctctaagcatctcgcaaccaagaagtcggcatgctcgctggccagacgcaccttgtacgagatgaaggcgtaggcgccgacggtgaggagctctatcgccgggcagggggcaacgccgcggtcagtttgctattcccctttgccaggcgccagaggcgcacgcacggatcgagatgtaggcgatccggaggtagaaaaggacctgggggtcgtcggtcgggaccttgcgggcgacctgcatcgctgtgggtggtcgtgccacgagcggaagcgtcgctgtcaactcgagcaggtagagtgcggcagggagggaagcgaggaacggacctccgagcgagaagatcatgttggtgatggcagggttgttcctgcatgcggcggccggcgacgtcgacaggaagcgggacgacggcggcggtagaggtggagtgcggcgaagagaagcagggtcagcccgggtgacctgcacgcgacgccgacgccaagtgccggaggttccagccgagtcagtagcagccaggcgcgagcgacgacgcacatgatgggcaagtgcagagtctggatgaggaggagaagtcggcgggcgagagggtgagctttcgaggcgacaagtcggacagagatcgccccgcgggcccggcggcctgccgcgctggcaggcaccggacggaaaagcggggccctacgcagcagccaacaggccagacgagcacgccgccgttcgtacgtctggctgcacctgcgcttctgaccgaggatggtgattcgaagacggacaagggctgactgaccgaagctgaccgacctggaccgacagtgccatcgtgaagcccatcgctacgggcggccctcgccccgcggcgcgatgtccgcagaccacctcggtcgctgtagatccatcaagaatgtcgcccgcccgctcaacgcgagatcggctccaacacggtcctcgtccgtggcaagcgcactgcccgcgaggcctacaagcacttcggcatgggcccgcacaagaacaagaagccgtgcgttcctatccttggactctgggcgccgctgcgccctcctttggccgacctccaaacctcagaccattatactgacttcatctccttctttccttcttaggcacgtgatcagcaagcaagtctttagccctcttatcagcgcctttgatcgtgcgctgaccgttgcttcatttcatcccgtgtcttcgcaggggccgcaagttcgaaaagggacgtggtcgccgtgcgtcgcgcggcttcaaggtttaaaggaagattggacccctctgccccactctctgtcaaagctgtggcctttgtctgggctcttcaccaacgtcgactcagcgttcctgcttcgtgctgatcaaacatgtgctggccggcgctgcaccttggagggtcaacaggcggcttccgagccagtagtcgcggtcctgccttctaggagtacaaccagtaagacgtttgcctcgtgcatgtcgactgcaggcctgacgctcgtctgccgtgccactggtcgcgaggtgacgctatcgaagaggttgaccggcgtcgaggcggattgcccgtccgttttgttcggcgggagggagcatcgcaacgaagtcaatcaagccttgagataaatcaccaccctgttgatgaatgcgtgctggcaaggcccaccaagtgctcgagtggaagagcgagcgtaagcgtgagtctagcagggagtggaaaccgaggacggtcggccttctgagcggcaagttgtcacaaggttgccgccgtgagcttgcgccgcgagcttgcgccgcgagtgtgagaccatccgcggtactctcttggaccggctcggcgctccgtgcagtacttgacgctttcgacagcctgaggaggttccagcggcctgatgggacagcgaccgctgtgcaactgcgtgctccagtcgagggttagcctgagtgtagaatttaggcctctcttccctcaatatttggtcagctgcgacatgttgcgcttcgtcagtcggtcccccaagagacggtcagtagggtggacgtcaggcagatgtcaggtttgcgtcgatcatgatcacttcagggtggttccatcatgaatgagcggtcacctgcccagtacttagacgaaatagatgaaagcggcctgccagagttttccgtgcgggccgcacgacctctggctcgggcgctcggcttgactgtgctgctccttcgaacgtccagcaagcctgtcagtccagtccaagccagatcgccatgagccagcacgagcgcatggcgaaaagggccgtagcccttcataacagcagcagctgacatcctccttgctgccagtccaaccacccctcttcgacctaccccgcttcgtcaagactactagccaaaatgggaaggtttgtcccctcttgtctcctccctcaaacagcctctacgccttctacggcgctgggacggagacgcggtcgtcatacacaccctaccctcagggctcgacaattgtccctcttccggccttttgggctgggagggggactcgcccgacgtcctacccatgaagcaggggagagaaggaagagagacagagactagccctctctgtccctcgaccttgctcaaaacctagcatactgaccgtctcgccctgcttgcctactcgctcagaatgcatgctcccggaaagggtatcgcgtcgtcggcgctgccctaccgccgcacccctcctagctggctcaagactagccccgaggaggtcgtcgagcagatcaccaagctcgcgcgtaagggtctctcgccctcgcagattggcgtcatcctccgtgactcgcacggtatcccccaggtgcgtctgctcatgttctggctcgatcccggacgctttcgcttacgctctccttgtcttcgcgccgccgcaggtccgcttcctgaccggcaacaagatcctccggatcctcaagtcggccggcatggcccccgagctccccgaggacctctactgcctcattaagaaggccgtcgccgtccggacccacctcggccagttccgcaaggacaaggacgccaagttccggctcattctcatcgagtcgcgtatccaccggcttgcgcgctactacaagtcgcgccaggtcatcgccccctcgttcaagtacgagtcggccaccgcctcggcccttgtcgcataagcgtccctctgcttgactcacgtctcggagacccggatgacaatgctgcttgaccaaatccttctcgtgcccactgttgaggctgctgctgtagcgtgggagggcctgcgtattcctttcatgtaccatgtctcgctgagggtcaggcggaccgggcttcaaagatcagagggctgaggcttcgaaggtcagcgcaggcagggccgtcgtctggcgggccgggttggctcggccgggaggacggtcagacacatgctcaggagacgccacgagcgagatagagcagcagcagctgctactgctgttcgagtcagcgagtagatgaacggaggacctgtatacgagttggatgcagtcgggagctcaagcgtgcgttcgtcggagggaaggaggcggcgtcgacggaccgaccgactgctgcctgcggccgtcgtggagctcagactcgacgagactcgaccaggtaaaggacagcgtccaacagcagcttgaaccgcaggtcaatccgccgaacgaagggagcgatagaaatcatcaagagcgagcgagttgatggtcggcctgtcgccgcctgtcgctgccgacctgtacctcacctcgccctagccgtcttccgtacaagccgtatccctggccgacttctcttgagctcgctctactgcagcgctcggacgctgctactgcagcctgatctgcctgggtgctccttgaacttgccctggcctggcctggcctggcctggccgcgcgcgaccctcgcttcttgacccgatgccactgttcaccgccaacatcggcgacaacagcacgccaggaatgagcaggcaagacacatggatctcgcacagccttgacagagcgtggggcagaggggtccaatcttcctttaaaccttgaagccgcgcgacgcacggcgaccacgtcccttttcgaacttgcggcccctgcgaagacacgggatgaaatgaagcaacggtcagcgcacgatcaaaggcgctgataagagggctaaagacttgcttgctgatcacgtgcctaagaaggaaagaaggagatgaagtcagtataatggtctgaggtttggaggtcggccaaaggagggcgcagcggcgcccagagtccaaggataggaacgcacggcttcttgttcttgtgcgggcccatgccgaagtgcttgtaggcctcgcgggcagtgcgcttgccacggacgaggaccgtgttggagccggtcggcgcccggagggcgagctggtcgagcgtgagggcctcaccgccggcggcgacgatgcgctcgcgggccgagcgcgtgaagcggagggcagcgaccgtcaccttggggacgacgaggaaacgctcgtcgtcggtgacggtaccgacgaggacgagaatcttgtcgccgttcgggttggcgttgtgcgtgtgcttaacgatccgcgagatcgacagagggggccggttggtcttcgagtgaaacagccgcttgaggacaaccttgttgaacttcgagtcggtccggcgggcaaggaagcggtaaagctgggagggacgagggcagcaggtcaggctcgctggcctcgcatcaccgggtcggatcaggccaggcgcaccttcacgagcaagaggaggtaggggtcctccgacttgggagcctgccgggcacccttccggacgtgcttgtgcgcaatgtcgataccctggagagagaagaggtgagcgttgacaacggcggtcagcgggtctgcaataggagcgaggcgatcgtcacccgacgacgagcagcgacggcagtggcagcagcagcaagcccatccgacccatcaaccctcccgcacctccctctgctcgacccagcgcctcttgtcgagcaccgccttcgcactccgacgtgctgcggctgaaacgcccagctcatcgcagacgccgagctccaggccaggacgagtcgccccgcagctgccggaaaggtgctgctggctggctccgggacggcccgcgcctgacgacgacaacggcggcacgaccggcgccgcatgtcgtccgtgctgctccatctcctgctgctggtgccgacgctctgttttgggacgaggtagggaggtcctacgaaccatggctgcttgtcttgaggtggaagctggtcgaagacggtcagggaggcttgggccgcgcgagctgcgagcgccggccggggcggagctctgcgcgcgcgcccgcaggctcaaggggtcatcgggggaatttcccaaacgttgggaccaattgacgacggactgaaacgcttgttgagggccggcttgaaacgggtcttgcttgcatcctcgcctactcaagagcagcgcatgctggagagacagagagtgcctgggcaagacgtcgagagaacaccctcttctgcagactcgcctcacgcagacgctggccggtcagtcgacgagaaagggggaagaccaactcgcgcagcgggcggcgcgcggcgagtacgaacgagtgacggggcgcacttcgactatgtacttgcgctccgtctatgagtggtctacatggcgacttgcaggctggtcgacgaacagcgcatcctgatctgcacataatgagacggaccatctccagggactctctgcataagtcatagcagaagcggcgcgctgggaacaagttggactcgttcgcaaggtggggaagagcttgcttagtatcgagcagaataggtactcatatggaatcagcgagaacgacgtctttttaaagccggacgtctgacgcgtcgtgtcaggctcccgatcggagccatagggcgaccgagcccttctgcccgctcctgcccctgcgaccttcatcgggcagtacccaatcctgcacgtgactgtcatctacgacacgataaccgatgtggagaggtggctctggcgcgtcggccgcttgtatgtagcaagcccgcgagcgccgcgagcgggacgttcgtctcggttgatcgaccggtcaacgaagccagcgctcacctcagccgcgctacgtcctgtcggccggcgatcaacaagacggcgtgcccgagcgatcttcacatcgaaggctacagcctgtcagcgagccggctcgatgaggaggaaagcgccacttcttgcgcagagaagcgacgcaccgacggaacccgcgcgcgtaggcctccgccggctgtcgttgtcagacaggtgctgcaagagtccgggcgacagcactgggcccagagtcgggtctacaacgaggccgatgcaagatggtaagcaggagagcatcagctggcggctccctcgcgcagtggtctgcgatggcgaagcggtcgactgcgcggcctgcttcggcgacacacagcgagggcgcacctctctatgccgatgccgtcccgtctcgctgctgacagccgtcgaaccgctagtcatgccgatgacggtccgacaagcgtaggtgtatgggagactcgaccttacgggctcggcctgagaaggcgggagtttgacgggcttgtcgtccagcatgggttccggaccgcagcgtggcgcaggacagcgcgtgcctacgccggcgtcggacagagagacctcctacagaggggagaggaccacacgatggaggatggcgagagcggcctatgggagaagacggcagcggttgccgtgcgagcgtatttcagcgttgcctagagggcgcggtcgagcgagagggcaagttgcgggtgtgcagctgagagccgcgaggagaaggcgcagcgcgctaatagagagcgagttctgctgttcaccttctcgactaaggccgtcgcccgaatgccggaagtcgtcgggtagtggatgggccgacgcgcagcagaagcgggcgatgtcgggaggccaggtctggtacatcctccggagtggtgaacttacgtcgaccgtccagctcgaccgaagccagggcgctcctagttcgacgtgtctcagacctggtcggtctctgcagggtaggtaggcaaggcgaggcgaggtcggcctggacagtgcgagaggtgcacccgactccggccttcctttgagcgtgatcaaacttgtctaggcaagagtcgcccgccgaacgacgatagtccagccaggcacggtcaggcgtcagcaggaggctacgagcagacgagtcgagcttcggacatgatggtcgcacgacaggatgtcgaccagggcgcggagccggccgcgtaagtcgcagttgcagtttcgcgctcgtggcttttcccggcgggcgccttcctctccctcctcctctccgtcatcaacccgctccctctaccttaacaccatggtcagtcgtggacaaaggcgcagcatgagaccagcagcatcgatcctgacactctcttcgtttgctaggattcatacgaccggcccacctcgcccatcaagcacgaagacgactcggcggcatctgcgccgccgcccgccaccagcaactcggccaacgacggctggggtgtcccgcctgccgatggcgactcggccgtcccgcgctacgagccgccgcaccagcgcaggcagtctcgctcgccctacccggaccgccgtggcgacgactatgtccctccacgccgtgagcggtgcgtctcttgcgcgccatctcctttcggccggttgaccgatgcaggcaggaggctgacctgaccagctgtctcttccacctggcagctcgccgccgccgcccaagccggctgcgtacgccaaccaggtgattccgcggtccgaggtcctcggcgtctttggcctctcgatccggacaaccgaggctgctctgcacgacgagttctcgcgctacggccgggtccagaaggtcgtcatcgtctacgacgcccggtccgaccgctcgcgcggctttggcttcatcaccatgtcgagcgaggacgaggccgaagagtgcatcaagcagctcaacgggctcgacctcaacggccgcaagatccgggtcgattactcgatgacgcacaagccccaccagccgacgccgggcgagtaccgcggcgagaagcgttttgaggacgtccgctacccgccccggggcggccctcctggcggaggctatgaccgcgacttccggccgccaccgccgcgcgactacggacgcgaccgcgactaccgcggcggtggaggcggtggctacggcggcggaggcggctacggccgggaccgcgacgactttggccgcgaccggcgcgacgactttggtcgcgattcgcgcccgccgcctcctcggcgggacgactaccgcgactcgcgcgccggaggtgcctacgagtgcgtccctcgcttgctcgctcagtcggcccggccttcactgaccacctctctgccacctcctctcgcctgcagcgactacggccgcgctcctcggcgctacgatgaccgcgagaggtacgcctctggtttcgcccgctctttctctccttacctgtcctcctcctcgacgaccgcccgtccggcgccctacacctcgtccgcctccggatggggcagcagcgccggccggcagagggcttacgacgacccgtacttgtacgcgcgactctgattgccctccctctgcggtctctcttccgcttgcggcctgttcccgctccgttggccgaggctgacttgtatttcctctgttccgcagcgaccgtcccgcgccttcgtcctaccgctcgcgctcgcccgccccgcgcggcggcgccgaccgcgacggccgcgacggctactctgcctcgcgccggtcgccctcgccccggcgtcctgccgagcggcgttactcgcccatgcgcgacgacgatcgggcgacgagccgcggcccgcgcgaggagctcgacgccccgccgaaggcggccgatgagagcgcgcccgctcagcgctggtagagcgttcaacaagactttgctcgagctcagcaagttggcaaggccacactggctggcaagagtcacgtcgcccgtcgcgctctagtagtctcaatgcgccccacaagcctccctcaactatcttcctcctccccggattcgtctcattatcgcccgtcccgctttctcctttgttgcgtaactcgatgatcaagcccgttcgcccttcaagttggcccaagcgcaaatatcgcacgctcaagcgcaagattgcccgctcgtcctctcgtccaagctccttctgacctctgctcaaggttccgttcaagcctcaagctggagcagacgaggcaagacggggcagggagggcagcgaggactcagccaagctgtcgcgcgctcggacgaagaggcttttatcgcgttcgaccgacgaggagcgcgaaactcgactgcaggctcaccctgcgcaagtccgtagcctctgaccttcaagtcgcctttccggccgctcgtctgcttgtcacttgtcgggattgcaacacggctacccaccgtccgatggttgagaaaacccaatgtgcgtcgctaccccttcttgcgctgacctgcagcccgacgctcgcctgctgcttttgctttgacgctttgacgttattatgaccatcgtgttctcatatcccgcctcttgggccttctgcgaaccaagtcaagcgcgggctttgaaggacgaggatggcagagactcatttagagccagggctgggtctgacgtgaaggagagacgggccgaggcaaacgcctcgaccgtccagcatgatgaggaggcgttgacaggggcgggcgggcgtgtgctccggactttcggctggccatcgacatctttccttcaaaattgcacggcacgattgagactttgcgctgcagagggaacgctgctcgtcgaccgtcggcttcagtaaagcggcggccggcgagatgcttttcttgccagcgcctgttgacccgttaccatggctcggggtttccgtccgagcggagcagggacgagcgtgaaaatccacgcaagaaaacgcaggaaagaggcgccggctcgacctcggtgggtcggtgggtcggtcggcagagcggtgcaggtgcagcagggcgggtcgtgacccgtgggaatgggagcggcgagacgacacgcacgcctttgcaccgaagcagtgatcaggtcgacgaggtcgacgagcgaacaaggccttcgaggtcagagcaacctcgcgctgcgggcacccacgaggttcctgcgggctgcggcacgagagaaccgcgccgaaagacggtagctggccgactcagtgcgcgtgcaagctgagcaagcgacagcgcgcaggaaaagagagcggcggcagcaggcaggccatagagtccgagaggacgcatgcccttaccgtgctcgctcgctctcgtccacgcagaagatggatcgccggcgagcgagctgccggggttcggcggctcctgaccctccctttcgagttggaacgcctctgtcctgccgtctgcgccgcactctgtcctctgtccgcagtagacaaaacgtcagcagagcgaatcatcgtcccttttgtccagccagaagcagacagaccgacagcacggcctgaaggctcgaatgacaatgcagagtgctgtcctgacagcaggccccggcggcggcagggtggcgtgtcggccctttggcctgctgcccgccctttcattaggtccctactttacgcccgccctgcccttttccaaaccaagcaagcaagggacgcgagccgttcacacgctctgctgccttgcctgtcgcacgccgctctccctcccccgccgtccaccgtcatcctcgtgctccttccttctctttctgcgacggagctcgagcgccgacccatccttcagcccacgcgcgcgtcccttctttccgaagcgagccagcctttcagcctcctctcttacgtcgtctgacgcaggcacgcctcgtcacccatcaaccgccctcgaggtcctttcccatcagcacccgaccaggccgtcctcgtgagttcgcccggtctctcatccaacctttcggcttcaggccgcagcctgtctagggacgaccggcctgtcactcggtcttggctatcgagcgcgcccggccacagcgcgcgcgacagatcacggcacgagatcgacagggcgaagccttgcccttcggcttgccgctcggcccgccctttgctcgcctccttcgggctctcgtgctcgtgctcgccatcaggtcagctgccgtctggctccatctgccagagaagagctggcaggatgctcgaggggtcgctcggccgggacgcgttccggcgacggcggccgctttggccggcttctgcgacaagctcggccagcagcatttgctgcagacgggatcagccctgtccatcgacccgtcgttcgttctcgaacgctcgagctcactcgtgttgcctcccctccgatcagatccacaagcagcgaggctctcgtcagctctcgatcgagtacgcgagaaacagcaacaaccaagcgcccttcgatcgcctccttcttgtcgccctcatcccgcccgcagcagacggcgatggtccaggaggacgccaacctcgaggccggcatggacgaggagatgcgcggccggagcgagagcagaagccatgacggtgcgtccatccttccatctcccggtgctggcaggtcgcgctaaccgacctgaccccgcatcccatcctctggtcatcattccagattcgtcagacggcacccagcatccgcacgacctcgcctcgccaccgcctcacctgccggcgctgacgctccagcggccgtcaaacggcgagcagccagcctcgcggccggtcccggtcggcggtcgcagctcggcacttggccaccacgctggcggcggcgggccagatgacggccagttctcgccgtcctgggacttctctcgaagcagcaacggaggaggaggacgtcatccgaacgagccgtcaccctcgacccggtcgcgctcgccaggcggcgcaacctcgccgggaggaggaggaggctctcgagccaactcgccccgccggccagacgccgcgtcgtcgtctggctcgggcctctccttcccgccctcgtcgtcgtttccgttcgcgcacggcagcgcgagcgccgacccggctggctcgcagggcatgatgtcggccccgccgttgagccggacgccgaaccacctctcgagcggctcgggcggcggcggcggcagtgggccagcgtacggcgacgcttcgggctcgggccggagcagccctggctcgcgagcggccggaccgcccggactcggggcccagcacgctgctttggacggcgacgaggagcgcgaccgcttcccgccacgccagctgccccagtttgacttcaatcagcgccgccactcgctcgctaacggcgaggcctcgtatcaggcgtactcgcccaatccgcacttccagcagaaccgacagccgccgccgtcgatgatggaccctgcggcggcaggaggtggtggtgcgcctccgggcgcatgggcggcccaggcggcgctcaagcgcaagatgtcgcacgaccgggcgatgcagtcctacccggatcactacaccgacagcaacggcggctcgcagcagggcggcgggaccgactcgccgacgtcggccggcggcgctcagcaggacctcgcgatggagggcgggccgaccaagcgtcgaggctcggcctttgacaacaagatgacctcgctctcgctgagcgagcgcatgagtgcccagggctcgcccttctgggccgatggccggcgcgactctgttgcctcgatccggtccaacgcgagctaccagagctcgaccggctacggcacgggaacatcgacccaaacgagctatacgggcgggagcgagctcggtggcgggccaaagtcatacaacggcggctggcagccccaatcgggccagcagcagccgcagcaccccggcatgccgcagatgccttctgggctcccgcagccggccccaccaggaccgcctcccggctcgggctactacggccaacagcagcaacagccgcctccgcactacggcccgccgccgggccacggctcgtacccgccgccgccgccgcacagcacgtcctttccccctcacccgcctacgcaccactcgcagcaccggccgggcccgcctccgatgcacggccacccgctcgacggccatccttcctcacagtttgagaactacagcatgagtggcggccagcgaccggtcccgcccgtcctctcgtcctcggcttcgaccgtcgcaggcgagcatgcgccctcgcgctcgcagtcgccggcgtcgtcctcaaactcgccccgggcgtccatgtcggccatcgaccaggcccagcgggtgaccatcacaaagtcggagctcgacgacggccggtcccgcggtggctcggtctcgtccgagcgcaaaggaaaaggcggcggcctgctcgccccgcccgagggcgagacgccctactcgcgcagccccgagctccgcgtcagccacaagctcgccgagcgcaagcggcgcaaggagatgaaggagctctttgacgagctccgcgaccagctgccggccgagcgcgggacgaaatcgagcaagtgggaaatcctcagcaaaggtgcgtcaatcggacctttgaactctctgcggccttcctatcgtgaccctgttcctgatcttcgctttcgccttctctctcgccagccgtcgatcacatcactgcgctcaaggagaccgccctcgcaaaggaccgcgagattgagcgccttcgccgggacctcgacgcgatgcggtacccgtcctcgagctcgtacgcgcccttgcacgccgcacctccggcgcctggaccgatgccgccgccgccgacggcttactcgcacccgtacccccactcgcacatttcgacgggcggaccttcgcaagcagcatcgggtcgggccccgccgccgccaccgtcgcataacgagccggccctgccgccgcatcagcagcagcacccgggcaacgggccttactcgatgcaatcgcatcggccgcctgctcaccagcagcagcaacagcaccacccgtcccagggccaacaaggtggcatgccgccgccggctggctacccaatgtcgcagggtggctaccacccggggccgccgccgcacagcatgggcccacgcgagagcctgccgccgcttcaacagtcgcgcgggccgttcgcttcgcacccaaacagccggcctctcgcacaggagaacgctcatcacgcgcagtgagcagcctccaaccttcatccttcgaacccttttatagatccgttatctcgccctttctctctgtctccctcacgcatgccttcaaccggccctacctccttaacgcgctctccccttcctccagctctgtctgtctcaaaagccgtccttcccacacccgcttcgcccgctcgcgagtaatgtctctctcctcctgcctgcgtaccaatctctatcttagactcactgtacgatcgattcggttgccgatggccatgtctgctcacataatcgaccccgacggtcgctgacgggctgagaagtcgtcccatcgtacaaccgcggctctggcttcctcctcctccctcctcacgccttcaccttcgcaatctctgccatgtaccaattctggatcgccttggtgtcgccagtgatggcgaccgtgtcaaaggtgcccttggccgcttgggcgagcttgccatcgttgacgagccggcccgaccacttgcctgccttttcggcggcggtcgcgatccggtcgatggcagcgataaactcaggctcgtcgccccgggcgggcacgtagccgagcagagactgggcgaggtcgttcgggccgatgaagacgaggtctgaagggaatgacgagagggtcaggaggtatcggctaagaggagaagaacagcgcagctggacggaccgacgccgtcgacggcacagatctcttcgacattctcgagccctgcccgcgtctcgatctggaccatcgtcaggagcgtctggttggccgagagcatgtactcgggcgttgtcaggccgtggccgatcgcagggaaggccgagccctggccgcggagaccctggggcgggaacttcgagtagtcgacgacggctcgtgcctcggccgcggtgttgatctgcgggatcatgatgccgctggcagaaggagagagcgggtcagcctgcgcgagcgacgaccggtcaagctgcagggacggactgtgcaccagtgtcgagcgcccgcttgatgatgtcggagcccgtgccgcggattcggatgatcgggctgacgccgagcgcgctgatggccgagacgcaatcgtgcattgactcgtcgccaatgtagccgtgctcgcagtcgacgatgataccgtcgaggcccgtcagggcgagaatctgagcatgccgggtgttgccgatggcggtgaaggtcatcaacgggaactcgccggccttgagtcggttgagcagccggagccgagggttggcgaccgtcgtcgtgtgggcagtagggtagtcggcagtcggcatggtagcggtggtgagcgaggcaatggaggacttaggcttgagaaggaagaggtgaaggagggctggaatgagtgaaggacggcgagaggggtgatggcaggtcggagatgagtcgacagggggcgacgacttactcattaagggacgagtcgtcagggagcggcccgcctggcgaccgggtcagcctgctcgcccgcctgccggacaaggccgaagggaggacgcaacctcatcagcgagcagcagcaagcggtcagtgtatcgtcccggctatcgagcgagcggccgctggtggtcgtcgggcgacaggaggcgggcggaggctaaaaaggagggcggagctcctccctctgcgcggtccccgccctgtcgtttcagcccgccgctccgagagaccctatcttgacttccgacggcgaccctgcactcccggctaacctcccgaacctccggttctgacagctcctcccaaacgaactccttagaggacggttccggtcccatcgccggtcgcccagggtcacgagataacgaccgtcttgcggttggctgcctgcacagggcgacaaggctgggcccgaggtgaccgacgacggtcccgctctcgctcgttctcctacaaaggcctcgcccgtccctggccaggccgggggaggatggtctccaaccttcccgcccatcccacctacaccctcgcctacctgccaaccgccagcaccatgtccgacattgacaagaacgagtacgagatcgaccagaaggacgccaagggctttgccggcggcgtcacgaccgaacctgccgcgcgcgagtcgcgcgagccagagtcgctccgtgacatctctgaggtcgacatggccgtcatggagcgcaagctcacgcgcaagatggacctcatcatcttcccgatcatctcgatcctctacatcctgtgcgtctccttttgctctctctctcgggtccccttcttgcgccccccgtcgagaacagaaagggctgacaaccaggttgtgttgatctcacagcaactacatagaccgtcagaatttgtcggccgccaaggtacagggcatcacgaccgacctcaacatgacgaccaagcagtttgcctcggccatctcgatcctctttgtgcgtcttgctcgcagtcgacctctcgtgccccctcttccttcgctgctgactcctcgacacctcctgctctctggcacactcgataggtcggctacctgcccttccagatcccatcgaacctcctcatctcgcgcatcgcccggccaggactctgtgcgtcgccgtttgttgcacccgccgaggtagaggtgctcctgcgcttcgcgctaattgcttctggcctccctcctagacatctgcatctgcgcctgcatctggggcgccatctcggctgcgactgcggccgtcaagacctactcgcagctgatggccgtccgagcaatccttggcgtcgctgaggcctgcttctttcctggcgtgcgtcacctgctccgcggtcgctgtcggttgaggctaacttgccacgtttctcctccaggccatctactacctctcggcctggtagtgcgttcccgcctttcagtctctctgcatcgcctcgacgcccaggagctcaccaaactgccttctctttccctcctagcccccgaaaccagctcggcaagcggatcggcggcctgtacatcgcccagcagtttggcaacgccttcggtggcctgctcgccgccgccgtcttcaagatgcagggcctccacggcctcaagggctggcaggtcagtcgcgcttctcttactccggtgttgcttcgaccctgacccaaggcaaaccgtcgccgttgctcttcgagtggctcttcgtgatcgagggatcggtcacggtcggcgtcggcttcatctgcgctttcctcatgcccgaatgtgcgtccctgcggaaattcgagtctccgctgagctcctccgctgaccttcgatccttcccgggccacacccccttctagacccttacaacgccaagatcctgtcgcccatcgagcgtgacctggccgtctggcggattgagcgcgagacgggctctgctgagggttcgggcccgaccgaatcggtcgtgcgtcctcccgagccacctctctggcttcgatctggcagagcagctgtgctgacttacccttctccccccttcgcctggcagctgagctccttcaaggtcgcctttaccgaccccaagctctacatgctcatcttcatgaacatgtgcgcgacgcttctctgttgacactcgatccaagagacgtcggttgacgattttccccctcccgacccaccgctcgcaggatgtcgcaggtgcagggctcgatcgccaatttcttccccgtcgtcgtccaaggtctcggctacggccggatcctgacgctcgttctcgtcagtggctcctcgtcgtctgcaatagcgggctcgcgctgacactcccgctcaaatgtgaccagacggcgccgccctacatctttgccggcatctggtacttcgtcatcccttggtactcggacgtcagtctctctccctccctccagcccgccatctcacgcccgccttgagtgatccgactgaccacgcctcctcgactactacagcgcaagaacacggtctacgtcccgatccttgtcctcatcgccggcgcctgcgtcatgtacatcatcgccctctcgacgacggccatcgctccgcgctactttgtacgtcaagactctggcgcgcttgcctcgctcgattcaagtactgacaaagttcccttcttccctgccaccaggccatgatgtgcctgtgcgtccctgacggcgagagccacagtggcccctttcttcatgccctcagccgatggctgacacttcaaatactgccttcttccccaggcccttctgctcggtcggccctcagatcctgctctacaagatcatcagtgcgtccgacagcatatttcgctcccgatcgctgccgctgacgtttctccccggccgccggcacagacgtccacctcgcccggccgacgaccaagcgcgcggccgcctcggccctcgtcaatgccatcggcgggacgtccaacatcgtacgtcgccgagcgcatcgtccgagaagctttcagaggctggcactgaccgattttgtgtctctctccctgctctctccagtggatggtgcgcatttggcctcttcccgagctgctcctgcgcagaccccgctgacagccttcttctctcgactcgtttagagctacctctacatcggcgcccctcgcttcgtcccggcctttggcgctcgtgagtcggccctgtgctggttcgctagcccgacgaccgtctctgcactccatgctgacggccaccaacgctcctttgccccagtctttgccggcgccggcctctttgccatcatgctcaccgtctaccgctggcatatcatgagcgagaacaagaagctcgattcgggcgacccggcccagattgctcaggtcgtcaagcgcggcgtcaccgaggagatggtccatcgttctctctctttctggcggcaggatctcgggctgacatatcgctcctgtactcgctctcaggtcgcgctcggctggcggtacgagatgttctgagtcggcgctgtaccacaaaactctgtacaacaaggagagggagcggtcgtttatcgcttcccgaaaaagggggagggagaaggaggagagaaaaacggaaggttgctcaccggcgcggggttcgctcgtctttttgtatgactctgattgattctggatgcttgttgttctccgtatcctgcttggattattgagggcggggtgggggggggggggcgtcaccgtcttacgctcgcgaggcggcgcctgtcgtcggtcgagcccggaggcacgccgacgtcaatatgccggtctgacctgccccggcgaagaggaatgagcgtaggctgccgcaaataattcaaggacaaggcgcgaccaggtcggaaacagacatggtcatcgacaagaggccgagccgacgacagacagacagacagacagaggcctcctgcgcgtgcaagaggcccgcgcagcatcatgtcaaggctcgatgagccgttgtgcggcttcttgcacacccttatcatctagagctgctagcagcaggttgacgaggagagccccctcgtactatagctctagagaagcgacttgatgacagcgagaggctgaagaggtaagaaagggccgtcgtcggggctaaaggcccagctcgtccctccgacgcactgccagaccacgcaccgccggctgccctcgacggccagcttccttcccgccagctcgccatcgacagatccaccaagccagctctacctcacgtaggcatcagtctcggaccagcctcgagccctcccatcgagcgggcagatggcgtggccgagatgcagccgccgcaggtcgccagagggcgccttcgctgaccgtgtggctcgctgattaggagccccgagagccagcctgagctctcgcaagtcgtcgcaggggtcgatacgatgcctggccgcctcatattgagctaggtccgaccgaggatgcgtcaccgagcgcggtgcgtccgacaacaaggccctcgagagcacagccgaccaacctgtcgtccttccgttcgctcacgctccctctcgtccgaccacatctcaattcgccacctttgccttagctaacgttcacagtcgtgtaatcgaccggccttctctctctcgcaccggtcctcgagaagtcggaggtcaagaagaacatagatcaagagattgggcgagacaaggatcgcacgccgcctcctcagacctgagcgatgcactcgatctcgataacggtcccgacaccgggcgccagtgcttggaggcatgagcgcgagggcatcggctgcggcaggaactagatgggagggaaggatttgttaggaaaaagggcgaaagaaggagagcaacgtctgggtcgcacgtcgatgtagacctcgttcatggcggcaaagtccttcatgtctgcaaggtatacgttgtacttaaccacctgctcgagagaagagccggcgagctcaagcacctccttgaggttctggaggactgtccgctagagatcgaaggtcgtctctgtcagcgggagggatgctgcgcgcgagagcgaagagcaaacgaacagtggcctccttgatctctcctgtggccgtctggccggcgcagaagacgaggcctgggattttggtcgcaggcgagttgtgcggcttgggagggaacttggcggacgagatgagcttgcgggtcgacgacatggctgggaaggagggaggggctttctggcaaggttgcgagggagaggggaggatggtgatgatggtcagaaggctcgcaacagctagctccggccggcctcaagaggcttccctccatctcccatcagaaggcccggctgcattctcatctggcgcaagacgggtagcgacagggcggaggttgggaggcgctgcgcgagagagaggaggccgccctggccgagaggagctcctcccgccgtcaacaattcccctgtccgcccactatctgcggccgcctctgtcgaccggcaaacgacgacgccgatgaggaccgagtgatgggctgttagtagagctgcactcatttcgttctctggcacagtcctcgagtcggctaccgtcggaggaggtcgtccgcccgccgtcttgctcggcccgacgcctcgacgctgggcgagatgctggccctgctggcagccgccgtcctcgggcccgacagactgacggctcctcctccttgtccgcccgaccaacgctgatcgtgctcatgtggtccgtagctgctcgggggcggggctgctcgggcgggttcataagtcgaaggctcgtcgtcggagagacccttgctcgctcaccgtcccacctcccgccctcgccaccaacatcagcccaaagatgcctgctaccgcccctttcaatccgccctcgcccgacctgcccggcaagccctacgtccggccctgggatgcgccgccgatcaccagagagacgcacaactttgcgcagctgacgtcgatcgacctcggcaagatggactcggacgacccaaaggtcgtggccgaggtgcaggaggagatcaaggtcgccatccgcgacgacggcttcatctttctcgagaactatggcgtcaaccaggagcaggtgcggcctctcctgatcttgagctctgctctctcgcaacgacctcgtctgacccatccttctcctctcgacgcccgcagctcaaccgccaattcgccctcgcgcagtacctctacgataacatctctgaagaagacaaagcccgactcctctttgaccccgacaccggtcgctggtccggctacaagcacccctttggcttcaagcgcaaggtcgggccgatcgacggcatccagcagttcaactgggtacgtccggacatggcatctgaagcgcacgacccctggaactgatctctcctaatgcagtaccctcgcgagtgggagagcctcacctttatcccgtcctgcctccacccatttatggacgagatcgaggccttctgcaacgtgcgttgcaccttcctttccgcaaggtcgttccagagcgcctgacaaaccctgttcttccaagcagtacctcacccaatcggtcaaccgccgcctgctgtgtctcttctcgcgcgtgctcgagctgccagacgattacctttggaacaacgtccagtcgcacggctcgccgaccggcgagggtacgtttcactcgtccagcccttcttcttgatcgcgagcgccacccgtctgaccctgtccactcgctcatcctccttcaaaggctacttccggcacgccctgttccgcccggtcggcaagacgacggccgagcggtcaaagggcgtccggatgcacggccacaccgactttggcctcacgaccctcctcttctcggtccccatctcgtgtctccagatctggggacatgatgaggcttggcactacgtgccatacaaggccggcgcgctgggtaagtcgcgctcttggcctgcaacctgtttcatcgaccaagctgaccgcccgtgctgccctcgatgccgccgctcctccagtggtcaacattggcgaggtacactgccttccctgctcttgcccgtactccgtctctgacatctaccttaaccctctcgctcatgcagacgctcgagattgtttctggcggccacttcaaggcgacccggcaccgcgtcttccagccgccagcggaccagcttgaccaggagcggctctcgctcgtcctcttcaactcgtcggtcggcgacctacgcatgacgcccgcggccgagtcacccctgatccagcgcgagggttgtatcgaagagcagggcgtctacaaggagttcaagaacattatggaccagggcgtgccggtcccgacgaaccgccagtggcgcgagatccagatcgccgaggcgacggacccgaccgacaccgagcgcaaccggctcggcgctgaccagatcatgctcgacggcaagctgatgcagcaccgcaactactttggcgtccgggtcctgctccccgtctgatcggccgaccttgcattcctccctccctctctcattggtcacccggcttcttcccctctctcacctcacttgtagcgcttcgcttgtatgccaccctctttgccgacactgctcctcgttcattcagtgtcatcagatcacctcgtcgatagtgactcttgcaggacccgcaagttctgcagcacgagccggccaatcttccaccggttgcgccggccaaacgcagcggctgcccagacgagtgccccggcgcagtcgccgcaggcgatgccaaccgcttgcatggccgccggatatccaccctggagcaattgccaggcgaggaggaatgccttgaacgcgtaggccgtgacgaatggtggctcggcgctcgaccggtcgggctcggcgagcagaaggaggaagtagtcgatgtgctgctgcagctcggcggtcgtcgcgggctcaatgatgaagctgcaggaggcggcgaggtaggtcctgcgccgagccagagaaggggcagtcagcgaagtcgtcaaattcaccgagggacgtctacgctaaggacgcacgctgttgcaagagccgcgtccatgctgacctcgacgacgccgcccatgtgggccgacgaccatgacagcgtctcgagcatgctgaacgaccaggatgacagctcgacgtcgctgctctcgtccggcccgtacttctgtcgtcggagccgtatttgcgggccgaccgctgcgagcgaggcagacaggacctaaacaggcgcacagctcccttcagcgacgtcttaatcgttgcgaggcaaacagatggtgacgtacctcgaaccgctctgggctgacgaggcccgacattgccgaccagcccgagacttcgcggagagagctcgaaagaaagtggatgatgccgactttcgggcactcgagccaaactgtgtcattgcctgaagtgatgctaaggacgcgcttgatggcgtcgcagtagcgaacaggcgatgacgctcggtcggcgatgaggttgcggtgcgcccagtcggtggcttgggtgcacctccagagcgagctctcgcaaggcaagtcgtgcttgatctcgaggtgcgagatcagtctcgggacagagaggagctggtagtagatcgagtcgatgtagtgtagaacgagtgtcgtgctgcgtgtggcgacaaagagaaattcagctgtcgagcagcgagagagagagggagagagcgctgactgaccgcttgtgcgactcgttcttgatgaactggcgccagagcgagtccaggtcgggcataccgaccgacggcagcggctgcatttggccgctcgtgcgggcgagctgttgggtcgaggctccggccggtcagctgaccggcggcgtgcagcgcggccgagacgcagatttgaacgtactccgacgagacttgaatgcattgcgagacctttggagctatcgtcgaggtacatcatcgcgtagacctcaaggaggagccaggcctggacggtctccaagctccgcgtcgagtcggccgggtcgtcttctcgctgctgggcaaagcgctgagcggcggcgtagcaccggatcgaggtctgctggctcgagctggccgacgttgaagggccttcgtcgttgtcgtacaaaagcccgagagcgacgcaggcaaggacgacgcactcggccgccgtcgccgggtcgaacgtcggctcgtgcaggaagtcgagccagggcgcgacgtgccggaagaagaggccgatcccacggtggatctggtcgcgtgtcggcaaaggctcgacggccagtgctagggagagcgcagaggtcgcactgtgctgggagccagtcgctgagggcggcgagcggacgaggtcgggcgcacatagccggcgcgcagtcgacgtctcggccggaggtgagccgtcgataggctcctgcttgatgagaggcaagataagcggtggtcagcgtcggtcaggcctcctctcctcagcgaatcgagtgtcggactgacctctgctggcgaccaagccagtggtcgtggaagggcgaggtcgcagccggctgcaaatagggcctgccacgacggcgtgagaggatcccgctggtctgtcagtgaagccgccgcctcggcaacgtcagatggctcgacgagcgtgctgctcgactcgaacgccgccgacgttgacgacgacgcctgctgagacgaccccggtgccttgcgcttgcccgagctcctcgagcgagcatcaccagctgtgcgggccggccggccgtactcggaggcgccagcggcatcggcgtgctttgtccggatgtgccgccggcggaggtccgacctcgcaaagtgcaggctgcagagatcgcatgggaagccgttgctcgaccggacgtggagagcggcgtgccggttgaggttctcctgcctgtcgagccggcgagaggaacgcggagacatgctggaaagtcagcccgcggcgaacgcgatgaacgcgcaggtgatacgccgccgccgttcgttggaggaccgacctagtgaagcgcttgtggcagacggcgcacgagaagggctgctgaggttctgccttactgacatcggtcatcgtgaaggagctcagggttgtggtcggggccgttgctgacgggctggccgagagcggcggcggcagctcagctgcgggcaggtgattcgaccctgacccgggcctgtcagtcagcccgcaactctcaaactgcagccatcccgcggtccgaccatgatgtgcagctgcgaatggcatgagtagatcagcgaaggtaggttcggtcagtcagggcgaggcgacaggtccagcaagaggcctcggtcggctccgccagacgctgtcgctgcagacgcgactcgacgtgtactgctgcgccttttgacgtccatcgccaacaaacgccaacgacattgcttcggcatcaagggcatcatgagatgtacatcacggcagggaggcatctaggtaagtcgggcggttcgtaaaggaaggcagcggtcgtggccgcggtcattgagggcggcgaccctcgaagcccgcattgtccgcagactcgtacgcgatcgcaggcttgtagtgttctggcaccgccaacatggacagagtaggagtcagaaggtagttcggaatcgagcggtgaggacgctcgctagcgagcgatgactgaccgatgggtcgggcagaggaggacgcagccgttgggatcgaggcggctggtgaaggcgaatggtaggacgaacggccggtcttggagagcgtcactccaaaggtcgtgcctgagcggtccagcttatcgtcgaggtcggaagacaggtcggtgacggtcgaaggagcggtcgaagacaactttgaacgcgttgtccgaccgctgcgccggacggccgtctcaacaccgaccagtgcagccagctgtgacttattggacttgcgcgcagagtcgctatcgagtgaacaaaggaggaaggagaggtcagtgcgcgatgctggggtagagtggcacgagaaaccatgaaaggactgacgtgcaggtacccgctcgtctggggccaaacgagacgcagcgcttgcagggccggttgtcgtcgcaggtttctgaggtggacgaacgagagagaatcgtgtcaatctcttacgtcggtcgcgtcgagggactagggtacacacttttggcctgcttgcaggcgacgcaggcattctgcgcaagtacagacgggtatcgcacgtcagtcgaacgttttcgcactgcgcaagggtggcatcgacgcaccttgaccgtctgcctcttggccttgcggaccggggagcaagcggttgacttgggcttaacttccggctgtggagaagaagcctgcgaggaagctggagcggaccgagcctggacgactgaccacttgccgtccgactcgcccttctggaacgacacatggagcggaagggcggccggaagctcggcgggcgagagggagttgtgcgacaggccggcagcaaacctctgctcaggaaggagcgagtcgatcgacgggatcgtccacttgccggcgagagtgaggacggccggcgacggtgctggagctggagcgtgctgccggtgagcattcgggtcgtcgtcggccgaggagtcctccgagtcgctctcgctctcgctctcgctttcggcaactcggtcgacataagggccgccagcattactggactgaaggaacgagtcgaggctgggcggccggcgtgcctcgtgctgcgaggccgactgcgagaggacacgacgagccggtggcggcgggcggagcgcggccggatgcaggtggtacgggtgggctcgctgctgctgagcgtgcgaacgcgatgtgagagaggtccggcgcggcgatgatggcgagaccgtcgtctggagggctccgagcaggccaggcgacggcggaggatcgtaaaccgacggcgggagcttgtaccgcggcccgatcgtcaaagcgagcggtgccggtggccgcacggccgatggtcgacgggtgagaggacgtcccgtcaaaagtggccggtgaccgagttgaggcaagtgcgaggatgggtagtagggctgcggccgagaggtcggctcgaagtgcgaccactggtcgtcggcaggcgacggcagcggccggtgcatctgcgcaggcgagatgtatgtcgacgtcgaagggctaagggagcttttgccgtagaggtggttgtggcggtcgcgcagcagagacagcgatggcggcggcagaggcggcggggggacgtagggcacgacgggcgggaggataaaggtctcgcgccgcgcgtttgtcgatgccgagggccgctcctctggcggcgagtcgaaaggcgcgtagacgattggtcggtcgacagaccagggcgaaggcgcgaggtgcacgccgcagtgcgaggacgacgggtcgagcgtcgaggaagtcgaacccgcgaaggaccgagcgctcatcggcggcgacaggggccgaggggccggatcatagctgggacgggggtgcgaccagtcgtatgtcggttgctgaggatgccagtacgagtctgcacgtcgaggtgggtcgtatcagctctaggcgagcctcgtccggaaacaggaggtcgagctggccgcacctccttgctcggacgcgagctccaaggcggcgaaaccaggctgctgctcgacgagccgtcgggcttgctcgacttgccaggcagcggcggaaagaggcattgtgggcggcgagagaagctgaggttgcaggcgagcagggtgggtgttgttcgacaggcagcgaatgagctcgtcagctgcagcggagcacacgcgtcagtcggagcttgcagaaggttctggctggcttgcggggccgcaataactcgctcgtctcctattgagtgatagtttgaaggtcgggctctgtaagaggtcggtcaacagggggttcggtcggaaggacagagccagagggcatgctgcgccaggaagaaaaaaggggctcgcctcctgttgatcgacgccggctcgatgtcggccgccaaacagccatgtcgcaagagaatggtctactgatctactcgtgcatagcggcaggtcaatggtcatctaaagtggctgacgagtgccgagtcgaccgagggcgttgcgcgacgcgcagccttacccaccgcagtcagttgatcgtcgcgtcagccgtgctgcttcggaggggaagcgcattaggtttgtcctttgaaaagaagtcggcaaagaagggggattctaatcgatgcatggcgaagccagagcgaaggagggctgcatcacccccatccgcgtcggccgaccgcccctgagagccacgtcggcagccccttcctcttttctccgtttccagcgcctcagtccttcttgtcgccgtcggccggcgctgatgccggcgctggtgcaggcgacggcgcggcactctgagccgacccaccctcaccacctccgttgccacctttgccgccccgaccgccccggccgccgccagccttcaggtcaccccgaccgccacggcccttgccgccccgaccgcgcgtcgagcccgaccaatcagcgttgctctggccggccgagccggtggttgcaccgccgacgatgaatgtcgggtcggccggctgcgtttttggcgaggcgccccggatctggcgcgacgagcacgctgcaagcgcagcatcgagcgcggcctgatccttgaactgcgaggagggggcaggcggcacgagcagttgtactgcatcagcagcggcgcatcgaggattggcagcagatccgcaaggcgaactcaccgatgcgtaggcaaacttcttctgctcgcccttgccgtcaaacatgaagcggacgctcgcgatcccagccgcggccgggccaaagtactcgcggagctcgacctccgtcaccggtacgggcaggccgttgacgaagagcgtgtgaggcgggtgagcctgacggttggacgccgtcgtcgatgccttgcgcgagcttgcggtgccgccggctgccgaggaggcctgagcgtccgacgccgagggcgcgggcgactgcgtcggcgctggcggggccggcgaggcgccgttcttggcgcccttggaagtcgctgccgtcgaggtcgactcgctcttcttgtgctgctggctgccgttaccgccggcgagcggcttcagctcgattttgggcccaccgctgcctgccgtcggagcaggcgatggcggctgcgcctgaccacctacgggcgttttgcgacccttaggcccggtcggtggctgctgctgctgagccggggctgtcgacgatgagttgttggcagcgcgaggggcagcgagacctttggccgcaggtggtgggttcgtagcggaagatgctgctgccgataccggcgaccgggcccgcgttccagccggagtagttacggcggcctcctgggccacggggggaggtgcacggcgatgcgaaaagttgaagcctgagcgcaagacgatgacgacaacggggtgagcaagacgaacacctctggccaaacgtggagaggacgcaccctggctcttctgctctgcgccgaccttgccatcctcgacgtcgagcacgaggtggccgaacgtgcagtcggtcaggttccagctccacgtgttcttccacgcgctctcctctgccgacggcccggcagtcggcccggtcgacggcggggctcgtgcaaagacggcgagcatcttgtcgaggtagaccttttgactcggcctgcgaaacgggacagacgtcgagagctaggcgttagtcgtcttagtagagcccagagcagagaagctgagggtacgcactcgatgacggcctcgacctgcgaccggaccatgccccagacctcctcccatctcttgcggccgcgcgtaaccttgccccaccagccacttccgccctcgtcctggacgctaaactcgttccagccggcgccgtaccggaagtgaaggccggacgagatcgtcaggtcagccttgagcgcgagcgagaggagcgagaggagcggctcgcggccgagcgacgagtgggtgatgagaatccgcgtctcggtcggatcgtatacctgggaggagaggaaggccagtcagcgagcatgctcttcgcgcggagcggccaagagtcgccgccgagacgcactcgctgcgccgtgtcgaccagctcgccgatctggagcgccgttgtccacatcgtgccctgcccgcctgcaatcgtcgcgttgccctcgcctgacaggccgaagaaggacgtcagcgtcctgtgcgcccctggcatgggtctgaaagccgctctggaagatgcgcaccattgtcaaacatcttggccatgacgaccgcgccgccgagaccgagcaggcggagccggacgccgccgacgtcgagcgcccgggtcgtcgcctcgtcaagaatcgtcaggttgttgaccttgtactcgcctgtgcgaaacttctcgacgacgcggacgtcctcgcacgcgccatagacaacaaacgtcgggacgatcagcttgagccggggcgtcgagccaaacaggagcggaaactgcgagagatggaagtcgtcgacgttaggcgcgagcgcctggacgaggtcccgccggggtagggtcggcgacaggagcttggtccgaagcgccggcggcagcagcggcgagtaggtgaggaggtgcttgagcgtcctgccggacagaaatatactgcggtcagaaggtctgaagaagatgaagatggcgaagcaccgggccgcagcggcggcgccacctgctcgacgagcgagcgcatcaaaggaggaagggtcgagtgcaggcgagccaacgactcacttgtccgagatgcgctcgatcgattgccgctcgtagagtccaaagtcacccgtgtggatgcaggcgatcgcgccggtctcacggacaagccggttgagcctgacaaggaaaggtagcgaggtgtgagcgacagtcggtcgtcgtgtgtgagctcgcggcgagctgctggagctcaagagagacggacgcactgctcgatgtcaccgcggatgtcggcaatgcagaggatgcctgcgaccctcagacgtcagagtgcgagcgagcagagccgaccatgataggacaaggagacaagggagcgagtcgctcgtgtcagtctcgttcgagcagcatcgtccgagctctcgcgtgaaaagggccctagcggccagagagagctcagggacgcacgtcctttgccgttgccgaggtcgacgagcttggtgtcgatctggtcgggcagcttggcctgctgctgctgctgggtcgtctgctgggtcggaggcgccatggctgagtgtctgctggtcgttggtatggtcgtcgggagggagaggcggcgagatgagggtcgcaagagctctcgtccaacgagccgacgagctttctactaacaacgacccgaccagaccgtattttcagctcaaagcagactagcaagcccgtcagagacgcacctgcagcagcagccgacgacaccaacactccgccagcttggctctccctcctttctcccgcccgccgccagatggccgacgcccgctcgctcctgcgcgcgaagaaggcgacgacggtgcccaaggtcgactcgccgcacgcaacctacacagcaaccggcgagctcaagtgcgtcctctgcgccgtcaagggtgagtatgcctctgtcaaccgggctgcctgaatagtgctctcgccgcctggctgacgcgttcgtggcttcctgcgtgtcgttccgttcagtgacgcagtggacggctcacgtctcatcgaagcagcaccgggcctcgttcgctcgtgagaaggaggaggagcgcaagcgggccgataagaagcgggcggcagcgacggctggcccatccgacggcaagaagcgcaaggtcgacggcgggtcgagcgctgccgctgctgctgttgctgctccggccggcaacttgccagccggtttcttcgccgatccggcggcggcaccgcctgctcggtcacttacacctccacaagtagctcctcctgcggtcgctgctccggcaatggcgccggtcgaggaggtcgacggcgaattcgacgccttcctcgcctccatcgcggccgcgccagggacggccgccggcgacaaaccgtcgaacgagcacgaggtcgagggccagacgaccttttcgtccgcgccggttctcgtcctcccgccgtcggccgaggagctcgtcgcccagcaggaggtggaggaggagagcgaggccgaccgcaagcgccggctcgagcgcgaggagcgtgaggagatcgtagctcggctcgaggaggaggagcaagcccaggaggaggcatttgagcgtgtcgaccggatgaaggagcggctgcgggcactcaagaaggtgcgttttttacccttcaatggcgatgttgtccctctcgtgtccgctgacctcctgttctcctccgctccttccgacagaaacgcgaggatgcgaagaaggcgaaggaagggccgtgacgccgggcgtgagatgggatgcgcaccacccttctcgccacactcgcacgcagcggttacatctcgatcccggcggttgcgcaaggccgtgcggtcgtcagtgccgtcgaacggtcagacttgcgccgtgcctcgacctttttcgcttccgctgctcttccggctcctagctctctcagtggcatcaccgcctccgagctgtgcgctcctgtctgcgagaaccgctgtcgacgtcggtgtctgcggccgtcctgaacgagtgcaaggtcgcgcgcccgtgcgttcgcgtcggatctctctccgagcctgtggagcggccgtcgagcggcgcgtcgaaccgcttgtttccgtccgacaacgactttcgactgctgacacattgtgctgttactacttctgaccgctgaagctcgctcatcgtcggcgcctcgagaaatgctgaaggccgccctctagtcgggcaaccgtggaacacgatcgacccccatgcggctggtcatcccaggacgtgcgcgaggacaccactagttccccaccttgcgctcggcacaaacagttccggtcgggccgacacggtcgcaaaggctttcctcgccaagcgaagagactcgacaggctacgcggagggaaagagctctgaggccccccgctcgctctcttccctgacggccttcccccccagcaacttcttccagctgcgctccttaccgcccaactccctcattacttgctgtgagtcctctctcttcgtctcgcccttcacgcgagctgactctgtcgctcaactacaaacggcagacgaagcagacgccccgccggcaacagctagctcaagcctcctcctcaaacaacaagaacacgtcagctcaccacattcactctccatttgctatgccgtcccgttgacatcctgccgcttgccctcgcgctgtctttcctgtcttgcaagcagccgccgacgtccgaaaagctctgctcgcctttcagcctcgccctcgccgcactcgccgcgacgagcctcgtctcgcctgtcgccggccagtctgtggcctatagctacaccggtccgcgctgcagcgtcgatgaccggacggcggcttcatgcccggcggacctcccaaactcgagcttcaagggagcgtttttgcggaggaggtacgaatcgcgctgctttgcgctgccacatgtgaaagtcgttcacagactgacatatcttgaaatcggccgttgcagccttcgcagcaggcagtctattcgatccaccagcgtcgccggtcacgcgccaaggatgtgctcaattctgccgcacctacgtgagcgatcgacatggctttctgagtctccttcagacaaagccattgcgctgacaggccacgtgtcccccaggccgccttcctttacagacccatcgacgaactttctggcttctgtacctgctttgacgatgtcgtcgctgtcttcaccgtgcgagcttgcgcgagatccggcggctcttactactaccacgacgccgaggcgagagccagcggcctcgcccggcgacagctagcagcgagcgtcgtcaggcgcgtgagcgcgacacgacgctctgcccgtcgggccttaccgctggccgcatcgagggctcggccgacggctacgaggtgcgtctcgacccggatcgctcgcccggtctgccctcagcctgaagccagccgaccgctgacccctttctctcccttcctcgaccgttgacgtccgcagtgcctcgacacgatgaccgagcttgggtcgtgtggcggctgccgacacggcgtcctgtcggccgagtcgccccggctgctctccctgtcggccagcagcgtctcggccagatcgaccgccggtgcatctcctcaccaagcctgcgcctagcatccccggatcgcttgtcgtcgctgacatctctcctactattcgcttggcctggcctgtcagcggcgagactgctctgttcctctttgctgacgtctctggtgcgatgggctacgagtacgtccactcgcgctacgacagccatcgcccgctctgctctcgttcgtcctgatgtcccccggtttgttccggcagctgctctgatcgcagcatgttctgttccggattgacctgccgcaacggcgcctgcgtcacatactgagtcggccgcgtcctctttcccgctccctcgcttcctgtcccgtctcccaatcttggcctgcttcctttgctgcattttcggcttctcacatgatctcctccgctcgcctgactcatgagaggagctctcgtctgctagcgataagaccatgcggatgagatgagtgaagcagatgcgaaggcgatgaggactgtgcgactacggcagccaatctcccgccgacgagtaagggctacgagctctctcgcagccaggcgagcaagccaaccgtgccatcgcgctcccaaacgcgccggttcggactcctgaagaggtttcggtcgacgagcagcttttggacggggaggtgtccgagaatgggagggagctgagcgcgaaaacaagatcagttggagagtcaacagcagatcagagtgggtcgtcgacgcacctgctcgattagattgtcctgcaggtcaatctcctcgcagcgccactcgccgtgggcgccctgcttaaactcttgcgcgatttcctcgagccctgtgaggcttcggacgccgctttcgcgcgcgcggatgacgcggacgccgacctcgagcagaagcgcgcgcatgacggtcgcgctcgcaaagagcgcatcggcgacgctcgattccgagacgtcgaggatccggaggccggggaagaggatcggcagggcgggcgcgagcggcgtcaggtggaccgggcactgggtgatggagagcgcttcgagcgccgggaaagagccggaggtcgggacgtcgctgaaggaccggatttgtcgcccagagagagcgatggcgcgcacatccgaggcgtaaggctgggagaggagggtcgagatggagaaggctccggcaggcagggacggcatcggcgtcttggaggcggctgcgagttggaaggtctgcgagttggccgagtacgactccgtaaagatcgagccggcgtcagctgacgctgctgctgtgggcgtctgcaagaaggtagacgcccgagaaggggtggtagaccgcgaggccgacaatgcgggcgggtcccaatcgtcaaaagcagccagcggcttggcgagtgaacttccgattgctgtggatgtgggtggccgagaggacattgatgaaggggccgttgcgccgccgttgcgccgcgccgttgcggccgccttgtccctcgcttttgacgaccagaaggggtcctcgtcgacctcagtcggcgttgttccgcgaggcggcgcagctgctgtagttcgcacgccctctggcgagggcggtacgtagacgtgtcgctttggtcgtccgccattggcgtccggaagcaggtgtgcgtcgaggacgagctcgatcttgccagggtgagcctcgccgctctccttggcggacagcaggaatccggacggatgcgacgtccagccggcgtcgaggcctacgacgatgaggccgggattcgacgacaggttgacgacctggagactcggtctgctcgttcgcccgctaggcgagagggaggcgacgccagttccttccaatccgaggtgccgcagctcctcagcgccgcggaacgacttcgcgaggtcgagctcttgcggccctccgccgcgggcggggaagagcgggttgccctgaaggtggagcgcgtctagcgatgccggccagccgtcggagggcaagcgtgcaagctcgagcgcgttgttctcgaggaggagtgttctgagcgccgggaacggcacggagggtgcgtcgggtgcgggcggcggcgaggcaaacgactctgggaacatgggcgcccgggtcggcaacgtgaaagcgagcgtcgtgagcccattgttcgagaggtcgaggtgggcgagtaatgggaggagggcgagcagcgttggaaaatcggagaacttgttgtgtctgaacgagtgccgaaaagcgtcagttctgaggtcagagtctgggtgccagcctgcgcaagacgaacgaaagagtcagtgtcgtcaacaggccaaggtgtggtaggctgctcggcagcttctcgagcctgttgtctcgaacctggaggggagcagcttcgtcagtggcaaattcaggcaaagatggccgccgtctcgagacgacagacgcacgtcgagcgcacgcaggccgccaaagagcccgagttcgaggtcgagcgactcgagcgcctggccggcgaccttgaggacctcgagatcgcgcccgccgatgaagccaccgacgttctcctcctcctgccgctcgccaaagacgtcgtcctcgtcggcgtcggggccgagcgcgagcgcgtcgagcgcgccgtcgagcgaggacgacgctgcgcgggcggccgggaagggcgaggcggctgactttgtagctgatgcggctggcggctttcgcgagagctccaaggcggggatcccgaggaggagggtgtagagggcgatgggcaggtgcgccaagggcacggagctgtcggcggagccggggatgtgcggcggaagaacgaggcggcctgcgacgggagaggaacgaggtcaggcgcgacgtcagtgaggtggtcgtagcaacatcagatagccgctcctgatccctgtacacgaccgtcctgtctacaggttgaggcgagcgtacgtgcagacacgggtcgagcagctgctactcgtgcctggcggatgccgggtgtagccgctcaagaggctcggacgcaccagtgtctgccgccttgcgaacgagctgccgaacggcctccctccgctcgcgagcgcgaggcgtccccgcaggaggcgttgctgccgcctggcggagcgccctgatctggtccttgatgctcgtcgaccgagctgctgggcctggcgtctgagggagagcgccggcggcgaaagcgcggcgaggcgtgccggtgctggcgtacgtgttgagcacgcgagggcggctcggcgtcgacgacatggtgctaccgagtagcgagcttggggcaagctggccgagggacggcctttgagggctgtcggctatctaccgtgctggtcgtcgtcgggaggtacggaggacgaggttggctgatcgaccttgccccgacccctgggacgaccatcttcgccgtaaccacagccagcttgaatagctgtagagcccaagagaactcagattcggaccatcatcaccatgccgaccgagccttacaaggagtatacgccgtgagtctgcggctcgaagcgtggcctgacgtcgtcaaggccactctggcgcgcgccgcggccgaccagctcttcgcctgcgcaagcagcctcgctgacctcgctatctcgtgacgcaaccgccttcacagaaaggagcaggccgagctcaagacggcagaggacgctgctgcttcgacctggcaggcctggcacgacgcaaaggaggcgctcggcgatgacgccacggatgccgacagggccgaggtcagccggctcaagggcgaagccgagcgagagcaggacaacctcaagacgcttcagccgatgtgctgagagcgagaattaggctgccggcgatgtcatgttgctgtctacagcttgcagtagagcctcttgccttttgcgactgaggcaaggccatcaggaggttcgtcgctgcgcagccgctctgtgcctcttctcgttgctccgaacgtcggaagcctcgaccggtcgacaccgaccctgccaccaccttccaccaccttcacagcatgttcacgccgtctctgctccgagcagcgaggcctgctgcccgtctgcgactcggccgaccctcatcatcatcagcagcagcagcgacaccgcctccgcctcgagcgacgccgccgacagtcccggcccgccaggcgcctcggccgctctcgtccgtccggacaccgagctcgctcccgaaagcctcggccaagactgactcggactacacgccgtttctgctcctgctcgcggccgtgccggtgacgtgtgcctatctagcctactggcaggtcggcaggctcaagtggaaggttgagctgatcgaggagctcgagctcaaccttggccgcaaggccatcagcctcccggacgagatcgagtacgtccggctcagcctagctgccgctttgaggtcgagatcgcggccggaggatgttgtactgaccatcgaagcgtctcttgttgcctccgccccggtcgcgccctctgctctgccctctcaggcactcggtcttgcccgagttcaactaccgcaaggttgccctccgtggatcattcccggcactcaacacgccgggcctaccgccacccgtcctcgtcggtcctcggatcctcgacggcgaggcaggttaccaggtcatcatgcccttcctccggtcgccatcagctgcctcggctgaggtttcggctccggaggacagcgccgcgtcgtcgagcgccgccagcagcagcgggtcgggctggttcgaatggctgtttggcggggagtccagcagcgaaagcagctcggcgccggttcctcagctggcagccgcgaagtcggtccagcacgagccgaagccgatcctcgtcaatctcggtttcgtgccgtcgtcgctcatccagccgtttaacctcggtgcgctccgcctccccgtcggcgaggtcgagctcgaaggcatgctccggaacgaagggcttggcaagctctcgtcggccaagaagggcaagccgacgatgtggacgcccgacaatgacgagaaggcccgcaactggtactgggtcgacacggagcggttcgcagagtactttcggaacgagaaccctgctggaggctggggggtggtcgagccggttcttgtcgacgtcatctacggttagtcttgtctgcctttgctgacactcaggctcgtgcgaggaggctaattcagacgccttgcactttcgcagacggcacgaccccgaaagcggccctgctcgaaacgggcgagccggtcggtcggccaccaaagattgagcttcggaaccagcacgccgtctatgcgctcacgtggtcgtcgatcagcgtcgtcacgacggccctcttgtggcgggtctggaagactgggcgtgtcatcaagccgcggtcgggccggggcgggcggtagacgggaggctcaatggaaccaccttacctctccttttatgcctgtcggtgccatctgtggcggccggccgagcagacgtgctgcggctcgctgcgagacttcggtctgcccctctgcgtcggcaactcctgccccccttctcttggacgcaagtcgtagatcgtgatggcatgtcatgctagaaattgagcgccctgacccgtcgctcgctcactcgctggagccggcaacctcgagcgcgctggcccagacgccgcggacgaggcccagcgcctttgcctcgtccgagccattagtcggcgtgtcgagcgtcgaaaagacgacagcctcgatcgttgacgtgtacgtcgacaggtggtggaggtactggcgagcgggtgagatgttagtgaaaggcacgatgggtctcagctcggaggtgacgacgcaccagccggcagaactcgcgccaccagccccactggctccagagaagccagtcttgggcatcccaagagcccttcgcatcccagccacccttggcgatgagacctgcgaggccgctcttgccttcagccgacgacgagcggagctgcggcaacaaagcatcgacgaagcgcgtgacgacggcgaccaggaccgtcttctgggtgccctggaaggacgtcaggaccttcaggccggtcttacgcgaggtcgtcgcggcctctgcagaaggtgagttaagggccacgagagtcagctcaggcaagggggctgcacgcaaccgatgcaggcacgcaccgctccggtccatgtcgacatctagcgcaggtccaccggcgggctcgtccttctcctcgtcaccggtgttcatcgctgcgcgccggccgccgcgcttctcctcctcctcggcctcgatccgggtgaggttacgccggacgccgacgacccggccattaaccttgtcgacgcccatccgaaggacgtcccacttctggccggccatccactgctcggccgtcgcctcgcggctgccctcctcctccttctcaaacacccagcggacaatgtcctcgccgctgacgatgccgtactgcatcagcttgtcgccgacgatgacgcgcatctgaccgctcgaccgccagaaggtgccgaccgcacggaggacttccattcgctgctcgaccgtctttgcgagggcacgcaggagcggcagatagcgctcggtcgcgttgaggaagtgcgagaaggagcgcgagccgatgaagaggaaggtctggagcgcgatcgaccgcgtctgggccgtccagggctggtcggcgggctggcctggcagctgggacaggctttcgatgacggcctcgggcggcgtcttggaccggagcagcgtctcgaggcgaccggcagcgaggtggtgctcgttttctgcgagaggaaggtggaccgcagctaggacgtcagcaaaggacgcaagtgatcgggtgagcgcggtcacccacctgggttctcgaacgggtagtacggtgcctcagagtcctcggcaaggatgccggccgacgggtcctgcattgcgtcgggcagcgtgcccttgatgcggtcgtgatacgacaggcgaatctcgagctcgacgacgcggcgcatgaaggcaactttggggtgcaaccgaggaagctcgaggtcgggtgccctatttggagtgagagatggtagccgtcagccactagcaagacagtctgaataggatgaactgagactgaccagtcacgccagagccattgaaagccaaagttgctcaggtggacgctaagccagtcggcgacccggcgcgcgcactctacgtcgaggccgttatcgagcgcagcgtagagcttgcgggcggtcttgccgacgggcggggcgaccgtcgctggcgagaacttgcacaactcgatgagcagactcgtgtagtagagcgtcgtgtgggccggcgcgggcagacggatgatcgtcgacaggacggatgagacaacgagcgactcgagtgaccaggtcggctggggcgcctcggggtcgacgacgacattcggcggcggcttaaaagtgcctgactcaagccagttcgggagctcgagtagcagccgagcgcactccttgcggttgatctcaaagatggttatcgtgtcgtggacgatttgccggagaacccatcccgaaggtgatgacggcgaagggacgacctgaatgaagatgacgagcgggtcagtcttgtctcgacgagcgagtcatggcggacgcacctcctcgtcaaagaactcgagctcgaccacggcccaaccctctgtccggcgctcgcgcgcatcgccctcctcgacgatcgctggcgggatcatgaagttcgggatgtcgtacagcccggccggatcgacgggcggctcgccgaagagaaggtgcggccgcgggaggaaggctggcggggcgaacgcgtcgtcgcggaggacaacgagagcagtgtgaaggtgggcgagggtctgcaatggtcgagcttaacgtcagcatccggcagcgaagcagttgaaggcctgagagccagctgctactcacgtcgcgctgctcaatctgctcctcgccaacgtccagcgccttggcgccgaacggagcgaccagttcaagccggcctggccgcgtcaaaacgtgcacctcgatcgtcgcaaggatggaggcgacagcctcagggtcgtgctcgtacaggctcttgccgccctgcgaatcgtcgaaacacacggcgacgtcagccattggcggctcaactcgggatgaggcaaccaagagagcgcacccgaatgagagcctcgccgacgcaagtgatggcctgctcgacccggctagggttgacgccaagctcctcgatgacggcgagcaggctctgaagcagtgtcaggagggaagcgggcgaaaggaggccgatggccgcgagatgcgcaaagagttggacctgcggcggttgcgtctgatcagcgcccacccatgatgaaggcagacgggacgctcagacgcacgaatagccgcgtctggagccaatgccgggcatcgacggccgtccggaacgtacgaacgagcgcctcgacgagctgccgaccgatcgtgccggtcgcgacgacattggctttgacctcctcgccctgggccgagtcctgggccgaccagcgctcctcgccgccgggcatgtgaggcgaggctgcgagcatggcaatgatcgcggcatagtaagggatcttgtacggctgctcgaggatgctggtgatgacgcacaggggagagcggtcagcaacagtcccctgcattggccaggaaggagggggcgaggaccgacccgtaggtgaagccctcaaggatggcgtccttggccgagaaccactggtgctcgatcgtccgtatcagccgcggcaagtcctgcaaggcgtcaaactcctggatggatcaggtagcgggccgggagtgtgctgtcagtgactgcacggtcgagcagcaagccgaggtcgcgacgtacgagcccgtctccgacggcaagggtctgcttcctcagcttctcgccctgcgactcgggcggaggcggagcgtctctcggccgccggtcgccgtccgggtctgtaagaggagacgagcagcgtggaaaatggtgagcttaagcaacttgggaccaggaggtcactggcaggtcggccgcagcttgacaaagagcctggcggagcaacactagacgcactgtagggagcccgcttgggtccgcggtagcctcctccagaagcaccgccgacgtggcgtgcgttgtcgttgtagctcatgtcgggctcgagctaagggtgtcggtcggggcggcgagccgaaggtcgaagttcgtcccggccaaaagtcgagcagcgcgcgcgcgcgagagttgtcgacggctgggctgtctgatctgcgtcgctactcctcgctcgactcaaaggagcataggagaacgatcccatgtgagagcgacggcccgcaggcaaggtacaggcataactagggcgggaggaggagggtagggtgagggaaaaagcatgcaggaagaggaaagtggagttgggggcgtgaagggacgtgatgaaggctgctggtgatggagagaaaggtctaagacacatgcgcgcagagagctttcgtcttttggtggggtggggggtgatttgctgcgagagacgacggggccgacgacagaggggacgagcgagcgagagactgggaagggaaagcagaaggggaaggaggaggaagggtccgccgtcgtcggagagtcttgccgggcagatggcagggccagcgacgggcgtccaaggagtcagagaagcacttgatggaccgaggagagacgaggcacggtgctgctggaaagccgaaggagggagacgagaagactgcgaggcgcgcaaggggggtgtgcagttactggccgccaaagttgaagccgccttggggagcggcgaggtcgctctggaaggcaaaggagccggcctcgtcgacctggggcgcgccaatgccagtctcctgggcctcgtcctcctcactgcagggcaaacgggcagcactcggagtcagcttgagatgcaaacccagaagagtctggccagaggcgagaacgcacgggaagaacttgtccatgatgaagaacgacttcttgtagatttcgaggttctcgtggtgctggaggttgtgaatggcgtgcatgccgccggcctcctcgacaaagagggcgtactggttctgcgagccgggtccggcagcctccttatcgagctcgccgaccttgaggatgttctcgatgccgtcaaggctgcgaggagaggaggcagaggcgaaggtcagtaataggcgagacgccttcggcagagagagcctcggcaacgcacgcaacctggatgatcttgttgtcgagtgtcttgagcaggtcgcacaggggcttgatacagccctggctgacaaggtagcggatctggctcggctcctgaaggccgccgctcgttgcgttgctgagcgcccagcaggcctccttcttggtcttgaagtcggcggcgccgagaatctggatcagcggcgggatgatgttggcgtcgatgatggcctggatctggtaggtcgagccggcagtgatgtttgagatggtccagcaggcctccttgcggatgccctccttgggcgactggaggagcgagagcagggccgagagcgcgcccgaggcaatgatgacctgtgtctgaaggtcgtcgccggtgacgatgttgccgaccgagcgaagcgccggcgtctggaccgacgtcgaagggtgcatcaggaggtcgaccagccggcggcagacgcccgactcgatgacggcctggatcttgtcgttcgagccgtccgagaggtacgagatagcccagcaggcgtcgataaggacctcatcgtcgagcgagtagatgagcttagtgaggactgtgagcgcaggggcaatctaagggggacgccaggaagggaacgtcaggacctttcgagacgcaaggcggagaagagcagagcaacgcacgagctcccacttgggctgagggttcttgccgcggcagaagttggagagcgtccaggtagcgttgcgcagcatgctgagcttgtggttctcgccgaggagggcgagcagcggcgggagcgcgccctgctcgaggacgtagtcgcggcacttgggcgagtcgccggcaatattgccgagcgcccagacggcctgctcgcgcacgtcgagcaccgacgacgaaaggagggcgatgaagtgcgggaccgcaccggcctggaggacgatctgggtgtggtgcgacgtgcccgaggcaatgttggtgagcgcccaggcggcctcgaactgaggagagaccagggaaggcagcaggaagggaccagttagcgtcggtctgtgaggaggaggaccggctggtcggacggacctggatcatgctgtgagtggacgaaaggaactcgacaaagcgcgggacgacgccgcactcgatgacccgctcgatgggcgggttcttctccttggagagcagcttgcggaacttggtcgtcgcgtcgagctgggcgtcgggcgagtcggagaagacggcctgcatcatctggggcaggtcggagagctggagcggacgagacgacaggcagcagcaggtcagcggagagcgcgcaaggggtcagccgagcccaatcaggccagtcgatggcagtcgctgaagaagaggacgcacagcagcctcgccgctggccgatccaccgggtccatcctcgtccgagtcggcgtcctcgtcgcgagtgaagttgcggcgcttggcgaccgagtcctcacgctagacagaagcaaggacgagcagtcagaggtcagaatggggcctagcttgagcgaggagcgaggcaagcgaggacgacgaggtggagaggagaggaagtccggggaaaaaaagaggttgagtgaagccctcgagagggtcggacgcacgcgggccttgcggagctcgaccgtctgctcttcacgccggcgccgggactcggcggcggtgaagttggatttggacttgtaggctgcgagatggagagcaggcgagcaggagggtggtcgggtcggagacgacagggagcaagggagagcacagtgcgcgcaggaaggagggacgagcgaaggtggatcagcgaccgactcccttgcgacagagctgcctgaaccgcagcgacgacgactgctagactgaccagcacgccgggcatcttggttccgcgactcggacatgggtggcaagagcaagagagggaagaggtcaaagaagagtcgttggtgatcgtgtggcggcggaaggaggtcgagctgaagctcgcggccgcgcgcgccggctgctgatttctctcgctcacgcggcctcgtaaccggggggcgtgatagcgtaacgctaacgaaaccgccttcggaaagtcagctcgctcgcgaccttgctcggccgaatatactctcgaacaagattgtaagaatccgttgttctgagctcatccagcgttcaaacgccggtccagcagcccaccctcgaaaatactaaactgaggatgcggatcttccccgtgagagggtcgagggaccgcggacctcggtattgtaaatgtttaagagggtgcgtcatggcggttcggcgggcagtcgcccggaccccgcgcgctgcaggtggccagcgccagcgcgccaccgcccgccaccgccctctcctccgtattccctcagtcatctgtactccctgcgtaaacttccgccaggcaaaatttctcgaggcatttcgccccgccgaaagttcacgcttctcttacaattgggtcctgtccttgactcctcacgcctagtttaccacctttctttccctcccgttttcttcctctctcgcgccgaagagtttcgatttctcattcagccgcaagccagcattcaaacccacccagcacttatagcaagccaagccaatatgccggacgaggtcggcaccgaagtcacgttcaaggtcggccgtcctcgctgccgtcctcgagaagaagacccatgcgtcctttgccaccgcccctcatcgtccttttcgccacctgactgtgagctgactcgcattgatgctcatgattccttgctcaatcaatgtcaagcgtttctgactgtccttactcctctaaggaccgtgacccacaacacttcccccacgagtctgctcctgctcctgacgcatccagccctcccattgaacgcctccttcgcccatctcggtcgagtcgtcacccacttgtcacacctcctctcgcttttgctcctccagagcggccagcatccgcttcattcacgcctggcgctgagcgaggcccgcagtcgatcatgtcggctgtccggcttgtcgaaggtgttgctgcgccggcgccggctgggcgcagcgcgggaaactgggcacgccgccagcgcctggcgaccgcccagcggccacccggtgttaggggacaactggcgagccggggggaggctagagctctgacgggcaaggacgagtgatagggggaacaaagaggcaagcttgagattcaagtggcaactcaaggtctataggggtttaagtaggctgaagtgtgatggcgaagaatcttctggaaggctgtgcctgctgactgattcggtggagatgctgactgatgcggtggagctggtgactcacgccggcggagctggtgccggagaacgaccggcggctgagggttgccgggtctagactcgtccggtggcgaccggtgtcgcgctgcagagtccacgtggaagttgcgaaccggtgacgggtggggaaccggtagtgcttgacttctcttctgtcgtgcgggctgaggccctgggtccgaaccccgagccggggatctgctgttcctggcagggtcgaaccatgacagttgaggacttcaacggcaggccaggtacggatgcatcagtaatggagcgtccataggcggtgtcagcaggaaacgcgcgaagaggttgtccttgcggtaaagaagagtgtcaagggttggttcgggtgtggggcggggcctcgtcgcctgttggacttctccgctagcaaagcgactcgacagtatgtatgctttgcgttggggcttccgtcgccgtcgcttagtctttggagccctcctcgctgtcaagccggtctttcgcttgaggccgagtagggattcgtaggcaaactggtccttacaatcgcgagtagtgacagttgcagcggcaacggcagttgacagctcgtcgacgacctgctgccgcaggtcatcaaacgtcatcggccttcgtatcaatttgctaaggcgcgagcctcttatatatcaacgttcacttgactgccctaccccttgcaaggccgtgagcttcaacaggcgctagcggcgccggccttgcgttcggcatcaagcgaagctaggacagtgagttcggctggcgaacattggccggcgtgcttccggcaggcgcgaatgttcaaaaccaagaattggagaactagtgtcagtgatagggcgggtgaagaaaggccggggtgcgtccgccagcgtcggactggaacctcggtttgggacaggtcgacggccggagaataagttgcatggttgagagatcgagattggcgtctcgatgccgattgcttcgagcgcctctttctcgccgaggttgcgctcgaaggagatccgcgacatcttagcttgagctcgtggacgacctccttgagtatctgcggcgattcaaagttggtacgcgcggcctttcatttacttcccctctccttttccttcttgatctcgtttcctttgagtttccgtctctgaagtgggcagactacttacctcaatgcttttatccgtcgctatcatgcccatttaaagcggatcagattgatctttaatgagttcagcaacagtgcactcgatgacctcgccgctgtaggaccctatctccacgaactgaatgggggggctcacccggtcttcagcaagatctcttgaacgagagcttggcatgagatgtcagaaacacttaccgtgataagtaggtaaatacgatcttggtatcccgttatcaaggagagatggccgagtggtctaaggcgctagcttaaggtcttcattggtcgctagtcttcgggcgcgggttcgaatcccgttctcttcatgaaccttttgctcatgggccaaccccgcgccgtcgtcgagagtccagcgtgctgatgtgttttcccggcccacccgccccttgcaagcatcggtcgtgactaagaatcatacgtggccgttcgccttcctgcgctcttgcctcgtcctctcaagctcgcggcacgcgcgcgctcgactcgagcgacgcagggagaatgcgccttcgcactctaagtgcatttcctccttacagtctcagatgctcgccggctgacttctgctgtctcggcagagttcgttggcaccctggcaacctatatcgactggccgacccgaccgagcttcatcggcggtcgcagctgccttcactttcttgcccattagctcatatgaatgagcacaagatcgtgcgagtactaggcgtagtcgccgttggctgaaggagaagcgagttcaatgacagccgacagactggcgtcgagccaagccgagccaagccgctcgaaccaatttaccttgtcagatcttgagtcgctcgctgacttggctgacaacagcgtcatttgagtcgtcttgactgctcgtgcttgccgcgccgactccgcgcgcacaatctttagctgacgcctcaatctgcgatgtctcgccagtgaggggcgagccgaaaactcaagttatttgagtcagacaatcgttcgtaccattgaaccagctcgggacggtttcacggcgtagggcggggagtcagcttaggctctgggtcgtccttggcgacgaccaggtagcttgtggcccagtaactgtattgttagcttgcaaagggtctgtcagaaagagggctcctccaattctgtgcgggtgatcaagcggtaatcgactccggcgctagatgcttagatttttttttacacgacctggcgcacctcactcgtgtcctgcgcgagatggacgtcctccggcgcccccttcaccaaattgggtgcgaacgaaggcacatgggtcactatccttgcacttgggagtagcaggcatgagtacggtcgtgactgattgaaagggattgtaagatgggatcaactccagtcggccggaaaggggctggcagaggggctgacgcgaggacgcacctcgacagcatacttgaggacgcgctgaaggcagacatccgcacgatagatgatgtcagtgcagccactgggaatggagcgctcgatgagctgagtgttcaaaaatggtgacaaatggtcaaaaggactaccgccgcggggaatcgaaccccggcctagcgcagacacattgatgggaagcgccaatgataccatttcactacaacggtgatgataaggccagaatcagaaatttgatatatatatctttgttaacgaattggctgaggaaacgagggccagaagacgagctgaggaacagacgttggtcaattggtgaacgaggcggggatatatccgaccgcacgtaacgttaccgctcagcctgaagcaaaaatcagctcgtgccagacggagaatcaataaatgtcgaacgtttacccgactgtccctgctccccctaaggaccgtgctcgttcaacaattacccccggcccccgaccatacacgagccgtcgccgtcgacctgtgcggctcaggtcgaacgctcgtcgatgtcgttctcgctatcgcgccagcaggaccggacagcatgtcggcacaagacgtcgaggcggtccgccggctcgtcacaacggctctcgaacgcacgcgtcttgacggtctgaacactgccttagcgctcgacggcccggcattcaagcagctcgccctccaggagccaaactggtcgacgctcgtcaacaattactcgacgctcacccgtaaactaggccacatgcctgactatgcagagcgcgcactccagatctgaggtacgcgcaggatgatagatccggccataatgagcaagacgtctggagcctacgacggctacctcatcgagaacaagcgcgtcatattcgttctcggccactgctgcggtacctcgcgacggaacaggtcgcagaaccatatataagggcgtcgccgatgccctgcgcaagcgcgcgcgtgacgggagttgagggcttgtcgttcagtggcgaccgtcgggcaggcgaggaggtgtgcttgtcttcaacagccgtgtaagacgaggcaggaggcagggccggctcagtcttaggactacaccgtgaacgactctggatcccacctgtaggacgaggcaggaggcagggtcgagtacagtggggtgagctactgcctaggctaagggggcctagaccaggaggagcggacgtacctcagtctcaggactactccgtgaacgactgaggtataggagggggagcaagcgggcgtctagctaagagggaggagcgaaaagagagaggaggaaagagtccggcggactctagggcgtggcgcccgggtgtcatggtttgaccctgccagcaaaaccaaatccccggctcatggctcgaacccagggcctcagcccgcacgacagaagagaagtcaagcactaccggttcccaacccgtcaccggttcgcaacttccacgtggactctgcagcgcgacaccggtcgccaccggacgagtctagacccggcaaccctcagccgccggtcgttctccggcaccagctccgccggcgtgagtcaccagctccaccgcatcagtcagcatctccaccgaatcagtcagcaggcacagccttccagaagattcttcgccatcacacttcagcctacttaaacccctatagaccttgggttgccacttgaatctcaagcttgcctctttgttccccctatcactcgtccttgcccgtcagagctctagcctccccccggctcgccagttgtcccctaacactgccgacggctgagacgacaagcggggtcgggacgtcgtacgcccatcggccggcgcggaacagggcgggcgcatgctggaggagacccttgccgagctcgactttctaactggctctctcacctcgctaccccgccaccctaccagcaaccaaccaacaaccttcggacctttcccacctcactcgccggagcctgcggctcagcatttagcagctcgttgaaacctccggtctgacccgcttgcactatatttctgccgaccttggtaaagtctgctttgcagcccctggccattgaccactcctggcgagtggtgttcgtcgaacgatctagcttacaaagaccctctcaaggacgcttgtctctgcacttcgtgacatctcccgggaggtcatttgatcgcgagctcctggcccctcggagtaagcctgctaaggcacaacgccaagttgacgagcgtacggcgtcgacgaagctgcgagctagggctatagtcttcacaagtaattcccctcctccttttgctctcggtacccacctagatcttcgccgcgtgagatcagtaacacactcaggtgtcgcggaaaacgcttcgagcatctgagtctctttcgacctaggtggaccgaagcaatcggtttgcatatgctccttttttaggagaaccacctccgttctaactctcgaccggcccgaccgacccacaatctccaagctttcggccctctctcgcctttctcgattggcccagtccccctcccttctcagcttcagtctcaagaccctctaaaacccaaaaacaaatcaaaatcagcaaaaaccaaaaaacatcctaggtctcgcctcagtctttctgcctcgcctgtccgcctcgttcttaccctccagtcttggctagcctgttcagtccccatctagctcccgcctcctggtctcggccagcaactcgccgtctcgcctatctcatccaccatcaagatgtcctctaacgacaaccccgacctcgcggcctacgtccagcaccagcaaagcatcacggagcaactccaagcccaaatcgcagccttggaggccgctcaagcgaccgccgccgctgccgctgcggccgtccccgtcgcagcgcccaccgtcaaactgttgccccctcgaccctctgagcccaaaacctccgcacctccgacattcgacggctccaagccccgcgaatgccgcgctttccccagccactgccggatcaacttccagactcaaccctctcgcttcgtcaacgaacagtccaaggtcttctacgcaattggctacctccggggatcggccttcgagctcgtcgagccctacctcgatgagactcaccatcttttccgcccggcctggctcgacaccttctcggcctttgccggacacctcaactccgccttcggcatcgtcgacgaggtgcagcaagccgagcgacgcatccgcaccctccaacagaccggttcggccagcctgtactacacgcgcttcctctcccttgcctctctgctcgactgggacgaccacgcgcttcggtctcagttttacttcgacctcaagccgcacatcaaggacgatctcgcacaccacgatcggccgacctcgctcgaagccctccaggaactcgccatccggatcgacaaccgcctcttcgagcgactccaagaacgcaaggacgagcgcggcaccactgctctcccgtcgattggtgccacacctcggccggtattccagcccacgcctcgtccgttcgtccctcggtccccgccagttgtctccggtccgactcccatggacatcgacgccgtcaacaccgcctctcctcgcggtcctctccctgctcaggagaagcagcggcgccgacaacttaacctctgcctctactgcggccaacctaatcacacggtcaacacttgccccatcaagccccaacctcgggctcaagcggctgggctcaacctcgctctcgtgtctggtgatccagaaacttcggatgactagaaggctcagcatcaagtcctctgttgagcccgattagccatcccaagccgttcaaccggccccccaccaaagctcaggcaatttccaactcgtctccaagtcttggccctccggccgccctcacctctttgtcttctccttccggcaacgcccttgactccgggctgcttcctgaacctgagctcgaaaagcgcgtcattctctcagccaccctccgcacggccaactctccaacggccgtccgaatccttcttgactccggctcgcagctcaacatcatcaactccgaccttgcccgaagcctctcggcacccatccagatactccctgtcccacgtcttgcgacaacggtcgacggctccccactctcaacagggccgatcgactctgtcctcttcggccacctctccttcggctctcatgaagagaaggtcgccctccaccttgccgccacctcctcggttgacatcatcctcggcatcccctggcaccgacgccacaatccggtcatcgattacgctgaagacaccctgctcatgcgccattccggctccaccctgggtccgctttcagtcaagaaccctccttcggccattaagtccagctctttacctgccaagccgctcgtctctcttatcgacgaaaaaaagttcgacactttactcaccgagcccgagaatcacggctacctcctccgtgtctcgtccgttgccgaggacgtcgaggtctcatcttcggacgactcagcaacgctcgagaccgtcatcccggccatgtaccacccttacctggacgtcttttcgaaaaacgacgcggacaagctccctccgcatcggacctacgaccactccatcgacctcgagctcgacacccaaccgccttttggaccactctacacactttcagagctggaactcaaagcccttcgggaatggctcgacgagaacctcgccaaaggctacattaagccctccaagtcaccggctggcgccccaatcctcttcgtcaaaaagaaggacggctccctccgcctctgcgtcgactaccgcggcctcaacaagatctccatcaagaaccgcgcggcgctgcccctcctcggcgagtccctcgaccgcctccgccgcgccaagatcttcaccagactcgatctccgcggcgcctacaaccttgtgcgcatcaaagagggtgacgagtggaagacggctttccgcactcgatacggccactttgagaaacactcgtcatgcctttcggtctcaccaacgctccggccaccttccagtcgttcatgaacgacatctttcgcgatctcctggacgacttccttatcatctacctcgacgacatcctcatcttctcgaacgacccggacaagcacgcggcccaagtcgaacaagtcctggcacggctccggcaacacaaactcttcatcaaggccgaaaaatgcgagttcgaccgcaaccgctgcgagttccttggcttcgtcgtctctcctaacggcgtccagatggacaacggcaaggtcaagaccgtcctcgactggccggaacctacctcagtgaagcaacttcaagctttcctcggcttcgccaatttctatcgccgcttcatcccagagttctcccgcacctgcacccctctcactaagctactcaaaaaggacgcgcacttttcttttgggcaaccggccaaagacgcgttcgccaagctcaaaacctccttcactaccgcccctgtcctcgctcacttcaacccggacgctccgatctccctcgagacggatgcgtcggacttcgctatcgccggcattctctcccagccggccctcgacggcgagcttcgaccaatcgcattccactcgcacaagatgcaacccgccgagtgcaactatgacatctacgacaaggagcttctcgccatcgtcgacagcttcaagatctggcgccactaccttgagggcactccgcacccgatccagatcttctgcaaccacaaaaacctcgaatacttcaactccaccaaaatccttactcgccaacaagtccgctggtctctcgttctcaactcgtacaaatactttcgacccggcaagaaaaacaccaaggtcgacgctttcacgcggcgacacaactttgaggaggggggtaacaccaaggcgtcatccgaagaaccccaggtcctcctccgtccaattcaggtctcccctctcaacgcggccagcgaaccatcagacgtcgtgacgcgcgtcaaagctggttacgatcgagacccgacggttaagactctactctcgtaccttaagaatcccgatcgccgtcggccgcccgaagtcagcgctcaaatcaaaggcatgactctcgactgtgacggtttcctccttcgccacggtctcgtctacgtcccggaagaccaagcactgaagaccgacatcctcagtcagtctcacgaccaccctacggccggccatttcggacgcttcaaaacactcgaacttctgtgccgcaacttctactggccaaacatctctcggttcgtcaaggactacatccgcacttgtgatctctgtcagcggtccaaaccgccccgccaccggccttacggtctccttcaatcgctaaccgtccccgagcaaccatggtcctcgatctcactggaccacatcgtcgacctgcccatctccagcggtttcgacgccatcctggtcgtcgtctgccgcctcaccaagatggctcacttcatcccgtgcatgtccaccgacacggccaacgacttcgcacggctctttgagaagaacatccatcggcttcacggcctcctaaaggacagcgtctcggaccgcggcacgctcttcacctccgcgttctggcgcgacgtttgtcggcaattaaacatcaagcaaaacctctcgacggccttccacccgcaatcgaacggtcaaaccgaacgagtcaacgccatcgtggagcaatacctccggacctactcggactatctccagactaattgggccctcatgctgtctctcgcagagttcgcctacaacaacacggcctcgtctaccaccaacatgacgcccttctacgccaactacggctaccaccctcgcttctcggctaccgttcgtgacgtcccggctccagcagcccaggaccatgtcaagcacatcaaggacacacattcattgtgccaggcgtcgatgaagcacgctcaggagtctcaaaagaaatacgccattcgacggcgctccccagccccagacttcaaagagggacagctcgtcctcctcaaacggaccaacatccggaccgatcggccgagtgacaaactcgaccttaagctcctcggacccttcaagatcctcaggatcgtcggcagctcagcctatcgcctagaccaccttaccaccacaatgaagctccatccgacgttccatgtctcactcctggagccccatcacagcaatgaccttccagcccgacggccggcgccgcctccagagcccatcgtcgacgacgatggtgacctacgctatcacgtcaaaaccatcctcaagtcccgtctccatcgacgcgccttccagtatttcgtccgctgggcaggatatgacgccaattcggactcctggattccgcataaacccctatagaccttgagtcgccacttgaatctcaagcttgcctctttgttccccctatcactcgtctttgcccgtcagagctccagcctccctccggctcgccacttgtcccctaacatcaaccaagaattcgtcggctgccagcctcgtccttcgacagcagcagtccgcagacggccgagaaaaagatcgaaaatatgctaaagcgcagagacagcagctggccatggagatttagcagcagctggtatgctactgctgcttccttcaacgctctcggcgggcctgccgaccttgctccccctctccctccctcccttttcccctagcttgtaacgtgggtgcttgtcgtgaatgcatatccgaagactgattactttgggcctgccctctacgtccttcaggttcgccgagcgtataagctccttcaagcaggcgtagtcctcgagtaaagatgcgtcgacgccaaatttatgcaaagtcttattgccgagaaggcaggtaatgatgttgatgagaaggatggcgacggagtgagcggaaccgacgcggtattctctgttgcatcttacggtcgagctgggtccagtgggtgacggtgtggccgaaagacccaatctacggggatatgaatgttgagctctatctactgaagtctcgttctttctagtttctcgccgccctcgcggtagccgcagagtagcacgccatccagcagtccatagccaaagtcgctatagcaaagtatcccctacaaaaggttcacaaggtcggtgggcttgcgctccgtaggggccctcgtcgcgcggtcggtctcagtccaagccgcttgctgaccccctctttcacccaacagacagaagactttcacccgacacgccgccaagcttgctacgtcgaagctgaagttttcatgcgacatcttcaacgtgccctttgaacgatttgaccttctccgttggcacaataagaacagcatcccgacgccgtcgatgcctcttaggtcggccagctggccctaagcagcccggataagcgtaaagcatcggcgatcactcctttgacggacacgggcgccagcacaggcgcctcgcgcaaacgcaatgcgccggcaggatcgacgactgcggatgcaagctcgagcagctttacaagcgtccgacaccgcttgctcacccgaccgagacggacccgtttgcctctggtagcatgcccgtccaatcctcgttgcttgacgtcccgccgccattatcagcggcggcggcggcgacctgctagccggcaatgacaatgctcggtacgtgcgggcccttcaccctcagtttcgcgcctcccgattgttttttcggcagcaacacgcggtgagtctgtccagtctcgtacaagccaaatatcagcatgacacccatgccgtaatcgattctcataggttgaaggtattccgaccgcaggtcactcggtgtcggctccgtcggcggttgcttgcacgccactccctccgatagatgccatcagcgcaaacttctggacgttcccgggcatgtcgccggccaatccgggctcaatcgactgtgactcgctttcgctgcttccctggactgaggcaaccgatcagccgacccagccggtggtagccgtttgaacggtcggccaaccgacgattggccaggctgtggccgagcagccaatcggccgtgtgcggcggagcaggcggctgaacatgcggccgaaagggtggccgagtgggcgacctagcacgcggcttaccgggcagccgagccggcagcagcaagtcgggcggctgaataggcagcacaacagtgggcggccgagcgcgtggttgaggaggcagctgaacaggctgtcgaacgtacctgaacactctgatcccttctctgttgatgcactgctgcgcacgccgatcagacgtctctacatctgtaaaagtaagggactggatttagagggcatagcgggcgggcttcgaggcaccaacctgtcatacggaagcgcgcggaggctggctgcgacaaaatctgacaacaattttgcctttcaaatggatcctactagcgcaaaaaaaaacatcggaggtgagctccggacttcagtttttcaatgacggaggactggcggctgtgctcacggtcggtggaaaaaagagggaactaagagctcctatgcgggtccggggtggcgttgcgattcgccgactgcgccgcttttgttctgctcgctagacgggagagggatcgcttgctgcaactctgccaacgttcacctgcttctcctttcatcgacctttcaaactttcgtttttcctcacttcttgcagctccctccctcacggtggccgtagaatagcctgccatcaaacagctgatagtcatgtatactgctgtcctattggccccttgaggtgcgtttggaagatgctaatgatcgctaatttatgtacgagagccatgtgatgtgggctcggcggctgactgatgcgtgaatgtgcacgaccaggccgtcaaagttcgtaatcgctcggcactgtgtcctatgctaacgcttgtgccgcaaacagcaatgtacatctagatcaactaatcaaatgagcacgtcttcagcatgagcaggaagggggccggaggcggggagcctgccgttgggcttggattctttaattggaggccgtagccagcgcttcatccagatttatgcaggcaggctcggagcaaaagtgtatgactccacggctgcaactcgaactcgattgagaaacgcaaccatttcaaagccttcggcgccggttgacctcaaaccattccgccctcgccgcctagctcccgcccaacagtccagtcttgatggcgttaatcggtcatgggtgctcgaccaaatatttcttccgatggcgggttaggatcgatgacggcggcgacaaattgtgggggcgactgttgacttccgtcccactacagttcaaagagtcgactgcgacttgtatgtccttctgccctacgaagctagctcttcagcgctcatctcggtcgccgccccggaatgctgccttcacgggcaaggataagaatctcggcggcagctacagcttttggattgtttttaagaagactaggtgtgtccaggtgtcttagggcattatgctggaaacgcccggcgccttggcgcaaccagacttgaaactctctggtttgactagtctgccgatacaaaccgataaatatactcgcgttccttgggctggcagacgcttcaaacaatgaaggagaaggctgtctgggcgacggcaaaatttgccgggctaggagcgttctgttttccggcaaaggccgaacgctttttgtcgagaggaagcctatgggcatttttacttgccgtgattgtatttctatatgaaccctatgccgcgcactcattcttcgcgttagatagaaaaaaagagtgacacaaagtgttctcgtttctacagttattcagtgagacgcgtcaagtctgaatggtcttgatttaggttcaataccaccagtgcagtttccaaagccaattaacccgtgaaacaactgcttgccgtgttcattcagcttacttgataagttaacactgcgtcgagctaagacgtgaaacagaaggccacgggaaccgaagcaaagcgtatttttcagactgacttgtttgtagctagctgcgtatatttggaggagatggatgtcaactgaagataaactgccgccttaattttccaaaaggaatgcgagcggaagcacaggaaaggagggtgcaattgactctgtcaacagtttcctcacgccagagtttgaatcatggacgtaaggcgattggcacactgcctttccgacataatctccaccactcgccattcgaggaaggtgaaggatcacaacacagcaccaagaggatctactcgtagtgttcgtgaaatccttcggacgactcgagttgatggtgcttcatcataaataatgctttccgctcagcattctaggggttgttcgagcgccacaaatccaggcaacgctgactggtttcaatgtaaacgaggctcctatacagtcagtcacacccattcagcctttgtggacaatttagacgcgtaaaatagacagcacgtacctgcttgcttgacctcattctgcttttaaagacaattaaaaatacagcgacgatatggttggactacagcaatggctgtttctgagaatctgatcgaaggaatggcttagtggttttgtaagacaacttcgtatgattccatatccgccgcgcgcttctaatgagcaatcttgagaagtgacagaatgatggagccgctgtcggggctatgttttacgcgctcggtcttttctcccggctccatcaaccgggcaccaccaatggggaggaagaagcttgtcaaaggccttggcattgaaggaagacgcattgacgacggcttttggctcagccaccgtcaactacttactacatgccaaacaattcagaatacacgagcgacctagaatataaaaatggagaagcttgtcccgggactatgatcagacagtctttggcggccgacattgctggctcatttgcactcaatttgctggcttagccctctcgacctgacagagctttgattcttgagctatttcaagctcaaacgagttcggcggggtcggcgtgctggctggggcgtccgggttcgtagggcaggaggagcacagcataaattcggaggtagaccgagtcggtcggtgagaggtcgagctcgaacgtgggtcatgattcaataggggctgaggtagctgtgaccgagcttgagcgccggccgatcgatcttgatgagcgatccgacctggaagacgttggtcgccggaccgtccatcgggcggctgctcgatgaccgtcaggcggcggtatcggtcggcctgggctttgtaggctgtatgcgccgcgatgaaatgggccttaatgttggcgtgcaccgcgcggaggtcagttccggccttgagcgcggtggtgttgtgggacgtgggacgaagtggctgccgagaggtcggccgacgagagagggtggtgatttttgattggcacggagcggcgtgtgcttcggcgaggccgcgtacggagttgaatgcaaatcgctactccccagcacgcgggggcgacgaagacggcttcgcagtccgaggagatgtcagtctacagcccgtgaagttgtacgacgtcgtcgaaatagaggagagcgaggtcgggtgcgaggaagccgtcgttcttttatcaatcttggtgaggcggtctacccacacttggaaacaatcgtaacccctggaccaaaggagcgttacgatggatccatgatgatccgcgtccaagggtgaccggcggaggaggccgtacgggcttgttgcggctgtaggcggcaacccgtgaaatgtgctgctgctggccggctacgcaaggtcccacgcttggcgagctcttttcgtcgacgtccgtgctgaggactatctcgttcgcacaatgagctttgtcagccggtggctgccgatatgataaaagcagcaatgtcatgtcttgaggtcggcggtgcgacgagtggcatcgattcggaccgccttcgcgagcaggacagccgagttgtcgttgaggccgcggccggccaggacgagctccttattagccgctctgagcgcgacttacgtagggttgactgccagggtcaggccgttgcgacgcacaggccgaacgtcagggtgactacttagcagtcgacgagagcgatcatatcagtagggttgtctcgctgagctctgagcagccggtcggtcgtgacggccgcgccggaagcgtctgggtcgggggcgacgaggaggactggattcgggacggctggccctcgcagcctgatgcggcgcggcgagacgggtccaggcgccgttgggtcggtaccgcccttcccgggcggaggggtggtcggaggtttcggcggcagatggatcggtcaggttgaggtggccgagggggttagagacccgaccggagatgcggcgatattcagtgctgccaggggagggaaggggggggggggctacccgattgtggcgagctggtcaggcgcggcaagctggaccggtcggaggagggcgagcgcgggtagagtagcaggcttgacgtcgaattggcgcaagagggcggtggcgacgtcgtttttgttgcccgggcggtacgagacgatgaagttgaacgaatcgagggaagcggaccagcggaagtggcagcgggcggttgaggcgaggtctggagagattcatggtcagggaagacctacctgtataggcgttctttagccccccagtgcacgagcctttgggcgagggcgttattgctcgccagcatgtttttgtcgtgaatgacatagttgagttccgcagcgttggagaagaggagtgttttccaggcggaagtcggtaagtcgtgatggacggagggttgggccgaattcggcgaggccaatggatcatgccgatgtgcgagcgaaacgaagtaggccgtcattgcggcgagtgtcaccttaccctcctcaatgttgcgcgccgcgtacgccgtgtgacacgcacagttcttggccttggctcaagagtctcccgcgactcgcgcttctcctgcttgatgcagaggtggtccaggacaacctcctggacagaaaaagggagggcacgcggaagcgagtcgcagcagagatcaggaaggtcaatcagcactcggggccaggcgcacaaacagagctcgggccagagggggcgccgggctgccgccctcaaaaacgtcggagtgcttggagttggtctgttggtatgaaaagagaaaaggcgcatcagcctcggctccggtagagcgacgtcgatcagagcgggatggacgaacgatgcgatcagagaaccccttgaacttgcagcgggcgcggtcgacgtcgcacgagttaaggcggagatggctgctgaggagagtttctttggcgagcgcattgaggccgaggccgacagcccgggtttgggcgtcggggccttgctggacgacgttttgcatcccgggaagcagaatgcggtggcatcgaagcagtcgacgccgtcgaccgtcacgatcgaggttgcagcggcccttatcatcgggggcgcgctgcgagagcataccggggaccgcgaaggacgaggcgtctgtttgaggacgaaggatcgggccgagtcttacactgcgagagtcggagcggtcgtgcaggcgagcttgtggacattgaagccagcgagggcttccgctctgaaggcaaatttggttgctgcggaggagctgggtgtgggcgagacgacgtgcagtggacaaaacggcggtaaaagttgaccaggcacaggaatggctggacgtccttgatcgagcgcgggaccggccagtcgagaatggcagcaacctgagaccagtccatggcgatgaacgtggccgaaaaactcgacattatgccggctccacgcgcacttttctggcttgatccaaagtcgggctttaaggagagcagcaaggacgagcgagacgtgtttctggcccaggtccagcagacgtcgcgcaagcagcagatgggcgtcaaacccctccatcaatcaacattgagaaaacgtcgcgcttgcactcagcagatctccttctcgattggattcgcacaacgctcaaacgttggtcgtatactagcgtcagatgaaaaggtgcggcagcaacgtcagggggcgccttcagcttaaaaaaagctggcagctggcgccggcggcgccatgcaggagatctaatcagtgatggcggtgcaggtgaggaagtagaaaggggggcgatctaagtggcgccaaccgaggtggcggcagtggcaccctggtgggtggcaaaaatagcgcagaagggaccgacacaaggacgtgaggacgcagcagacgaggcatcgacaactatggcgagcgagggcaagtcaaacaatagacgccgggcggctggatgaggcgaacgaggtagcgtccggcaggtacccatcccaaggcgctttatagtggagcaggcgagaccgaggctgcggcgggcgaatcgagcgggtcaacgcccctctgtaccgatccgagacgagtgaggtgagcgacggactcgcagaatttaaaggacgaagggcagaggactagagaacgttggggcgaggtcggcaggacgaggtgagcgtaccagcggcgatcagcaggttgcccgcgacaaagacgcgcgaaatgcagccgaatgagacgagctaggtgagagactgaatcagagaagctgtggcaagagaagctgaaggctggagatggaggagggagatgagggtgaggaaggaggagaagggccaacgacgccaaaacggcaccgtcaccacgggcgacgacatctcaaacgacgtcagataatggtcaggcttgagcgatgtcgagccggggagagagccaacgggcgtcatctgatcgtcggtggccagcggcgagtcgacaaagacagacagctggctttgcagctgactcataccggccgcagggacgctttgaaaggagtgggcggcttgtctgcggatgcgcctgctacctggtcggagtcgatggttgcaggcaagcgaggctgcacaggaatggcattgtgaaaaggttggcgagaatgcgaccggtgaagacggcgctcacgaaagtcgcccgtgcgaagctttcggcacgcagcgaaagattttttgcagaagataagtccatttgtgcaggagctcggtcagcgctccacgacgtcgacgattacctccgtccccagttgtcggctcctcatcgcccctcttgcacccaggctccctctctcgggccgcggcttgcccagaggactgaagccggcaattgaaacctcgccgttatcttcctcgttgctctcgtccctctcgacggtcaagttgcgctctcgctagtcgtcctgccactgagaggccgcccagatacagagtttaacggaactcgagtgccttccagcgctcgacacagagaccgagccagatatgccccgcctccaatttgttaaagttaaggtcagctggaagggcgcctcggacttgagggcggcgtgtatcagcatcatcttgtgtgaaagaagattgaagccaagcacagcgacctcggtcgcggcggcgttcgctgagcgaggtttagagcgacctcgccgaccgactcgccctcggcgctcttgcaaacgccggcgcagtcatgcgcctgtcatccattcttaatcggtctcggtagtgccgactgccgacggcgcgtcgaggaaccgtgctggatccagacacgggacgtgacgcgcatgttcaaggacgcgacgctttcatcatgttgagaaggtgctttgtgataacaatcgacaattgggaactaggttggttgagacgaaccgctcatacgggactctcgcgctggacctccatatcgaccagtcacctgtgcaccttgaccatccggccaaaagaaggcgcttggcgcgcgcttcggctgcagctcaggcccaaaagggaagccccgtcagcctgaggatgtgtacaccacgaacgacctggtatatgatactgaaattatccggaggagggtactgatacgtatactggtagcataccagtaggcatagtggtgtgccataccggtgcaataccaggaccgatactagtagagtaccagtatgcataccagtagcctaccggtatgctaccaatattatacctaccaatatggtccgcccagattttgacagcgtcccctgagcgcagacaaaggggatgtcagttgaaattggtgagcgaggtcagcgaggtatccggaagagttctgttgaatgggcaagaaaagttaaaattatattggtatggtactagtatgcctactctacaggtagcatactggtaggcttactggtatgctaccagtacatctgccaggaatatataggaatgtaccaggtcgtccgtggtgtaattgggcttgcagtacggctactgcttacccttgtagacgccttgaagtgtagcaggggatggacttgtcgtccctgacatgaaggaaggagaggcacggtcttgagctgccgtccggtcatgagcattgagagacgcgctgtttgaccttggcggaggcggcgagcgcgttatctaccgggcgacgcggcggcatggcaagtgactagagcggccggctgctacctggcccgatgctgtaggctccttcagcaaaacgatcgtcccccgggatcatcgcatcgaacgcaatgcgctggggtccgacgagttagtagccaactttttatcccgcgcattcgcacctggacccgccaacgactagccgcctctgttttttgtcaacacctgacagagatgaccttaacaaaatcgcctcgatgtacaacggacacctcggcgccgttggcgtccccgccgtctcctgaaagatcgtcggccccaaggagaaacagaagaatcattcctgctcacctcggcctcccatgggccgtgtacctgctgattatgaattttcaactcggctcccagacggcagcgacaaaggaggcgctggagtcgcgctctggcttcagaatgttctcgaccgaacgacagtcgagacgacactgctcgcgatctttcgacaccactcgccgaatcccacagtcatcgacatcgtccccgtcctcacagaaataccctcgagccacggctaccggcccgtgaattacaatgaaagcgcgaccagctctcctcgaccgagttctacgctcaggagatgctccgctcccggctcgaccttcaggaccccttgtcaatacctgccacctcagctgctggctgcccaagtccatactgacgcctgagttccaccccgttccatcagtcggtccgcagctggcgtttaataaaaaaggacagctggctgcaggattcgaacctgcgccctacaagaggaggtgatgatcgtgttgattcgaatcaaccgccgtaaccacttggctaagccagcctgtgactttcaggaacaaaaaatatgattcttaattaagtttgttgtggctggcggtcccagcgccaccgacaggcgccacacgcacccagcttatcataattccatggaatgtcagagggcttgacacctcccgttgctgcgcttgcttttgcgctgaccgcctcgacccctccccggccctcctggcagcttcagctcaaggggacctccgaaggcaaaaggccgcggccaggtcgacgcgacagaggggtcacacttttcgtttgatcctaaatatcttgcctacctaagatcggaattacaccagacaggcaccgttcaccgttggaaaggaatggtccagagctctcttttttcgggctggatgctttggttccctcgccaccgcggtgcaagagggctcgctgaccttcgtccccaactaccaccccgccgtcacagctcgaccgctacacggcctcaagccgcatacggattgccctgatctgtcctgtgagccgtctgctagctattaaccccgccctcagcggcgttcgtttgaggagtacttgagactgatgtttgccccttcccgacctatctcccgcttcatccggcctgccagcctgtcatcgccctcggatcgcgacgagctactccaacagctcccattagcatcactttatcatcacggttcgtctaatcgtgctcttgagctcgtccggcggcggcattggggccgggcgtccggagaggtcgctccgtgggctaacacacaaggcacccccttagacaacctgcacgccacgtcccgtcacgtcccgtcgcgaccttcacgacctcccttaccccctccctgacgatctttcgcacgcctgcgccacgcccgacgtccccatgccatttccatacttctccccttcgacatcgattctatggcggccgcctgcgtggccataggatccacagccagcccggggctcacgcagcaggagccgccgcacgagggacatcggctgggtcgtctcaagcgcaagtctaatgggtaagttgactcgtctatttttcccaaataacctgctgctgcacctaactaactcggctgactcggcttctggcgtcgcccattgcctttgtgccgtccaaatcggccggcttctcagctcctttccagcggcggcgagcaactctttccggttggcactcagtcattgacggctcctgcgacgatccggtcgctcaaagagcctcactgagggtcgctcgctcgtctctcctcgtgcgtgtaaccttcctgtgcctgcgctgattacagtactattcctattttatcgcagaacaacggattcgttcatgatctgttgcctagtcgcaggcgtaccccagcaagtacctcatcgcgccgagcgacagttacatttacgacccgatgctctgtgtaggcaacgaccagtcgaatatcggtctctccacttcccccagcagcccttttacagcacgctaattgagatgcgagccaaatcgctcagcattgttgagcgaaggacgaaacggaatgagctacctcagtcaccaagacgtggactctacatgagatactctaggcacctgttgagcgaaggacgaaacggaatgagctacctagagtgagggtcgagacgtgttacaagcggtgagcaaaataaaaggcgaaaggtggaaactgacctcagtcaccaaggagctgactgaggtcagtttccacctttcgccttttatttgagggaagcgagtcagtcgaagggtgctgaggaagggcgggagacgggcgaaagacgtctcgacccgccctcctcaccgcctgatcccagaacaagcggccgcaggacataccctccctcaagccactcaggcgcctgcatctccatcccctcccactgcttcgccagcccatccgcgacgccctgtccgcccaagccctggtcggtccggcgcgcggcgtcggcgacccgttcaggctcggggaggtccatctgggcgagttccgactggaggcgggcctgctcgagcgcctcatcatagtcgaggttgtcggtcgaggtctcgttggttcgcgagaggtgctcgggcggcgggaggtctgcgggcgggcaggaagaggaggaggacgcgacggtacggggcgagaggcgagtcagctccctctcagtctcctcttgcttttgagtgggcccggccgcacctagcttggcgagctcatctgcgagctggtcggacgtctttgagggcttctttgcgtggcgggacgacatggcgtgtatatgggctgtatgcgggtcggaggcgagggccagcgcagggagggcaagatggtcggcaggcgggcgggcgagaggcgagacagcctgacccccgatgaaaacccccatctgggctctgtcgctgtgctgacgcctccccccttctggtgcgcgttcatcacaccctcctctccctctctttcactccttcccttccctcctctccatcccgacaatgacgagccaagcacccatcaacggcgtcaaaatcaccggttggtcctctcgcgccctcttgcgactcgacccgctctgacccagtcttcaccccttcctccagcggtcgacgacccgtcccgcatcgtccgcgtccaaggccaggatggaaagacctctgccccgcgcgagattgcctacacgaactgcaaagtcgtcggcaacggctcgtttggcgtcgtctttatggcgaaactcgtccggccccaaggaggcgtgcaggccgtgaagcgtgaggagggaggagaggcgggcgggtcgagttcgaccaccaagtcagaaccgacgccgacgacgacgatggccgagagcgaggcggacgagcagcagccgagtgcgtcaggctcgtcgtcagcagcagcagaggcgccggtcaaggccgagggtcagcagccggtcgaggtcgtcgaggacattgcgatcaagaaggtcctccaggacaagcgcttcaaggtgcggctttgttcctccccctcgctcttcatccttcctacgcacccgctctttcgcccgctcgcttggctctcaacaaacggagcgccgctggagcatacgggcggctcgccctagccagaagagccgagaactcaagccgccagccagccaggcgagcgggcgagccagatgccctggcattcccccatcgcccctcgtctcgtctcacctccttcacccgctcgcctggtcgagcgacgcgccgctcccggtcctagctcagccagagcaagcactctgtgtccgcctcccgagctcctggccgcgtgttcctccccgaagctcgcgctcgcttggctgctcggcgacagctcgcctcgtccgacctggcctggcctcgccctgtgtcggctagctgagaggagaagaggcacgacaaggcggagggacctccgtttgggatgccctcggctagcgtacgccagacatgtcgtcataggtcgggtaaagggacgtggcaaaagctgaggcgagagcgtcttggtcgtccatagcgagttgcagctcgacctttctcgttccttctcgtgcgctcccctcgtcttccaactgacccccgttggccctccagaatcgtgagctccaaatcatgcgcctcgtttcgcatccaaacgtcgtcgacctacgggccttcttctactcgaacggcgacaagcccgatgaagtctacctgaacctcgtgctcgagtacatccccgagacggtctaccgggcgtcgaggcactatgcgaagctgaagcagacgatgccgatgattcagatcaaggtgggtgcccgggtaggcgccgctcgtcgctccgtggacgagactgacccttcgctccgttcctatgctcctccagctctacatgtatcagctgcttcgctcgcttgcctacattcactcggtcggcatctgccgtgcgtctacgagtccgcttgcccagagagtggccgttccccttgaacccctactgacgaccccctccccttgacgtagaccgagacatcaagccccaaaacctgctcattcacccgacgaccggcgtcctcaagctaatcgattttggctcggccaagatactcatcccgggcgagccaaacgtctcgtatatctgctcgcgctactaccgcgcgcccgagctcatctttggcgcgacgaactacacggccgcgatcgacgtctggtcgaccggctgcgtcatggccgagttgatgttgggccagccgctgtttccgggcgagagcgggatcgaccaactcgttgagattatcaaggtgctcgggacgccgacgcgcgagcagatcaagacgatgaacccgaacgtgtgttcagcgcgggggctgccctcgcagaatcgtcttgccgccccctttccctcgcctgctgacgcaacgcctcgcccccgccgccgtcagtacatggagcacaagttccctcagatccgcccgcacccgtttagcaaggtcttccgaccgcggagtccgtcctctcttgcctttgctcctctccgcacttttttgctaacagcaagtcatcccctcgccctgatcctcctattcctcctcccctcccctaactacaagccgacgcaaacgccatctcgctcgtcgagcagctgctccagtacacgcccggccagcgcttgacggccctccgcgcgatggcccacccgtttttcgacgagctccggctcgagggcggcgtcctgccgagcggaaggggcttcccgccgttgttcaagtcggtcttgcgctcgcttctctgccctcacgacaagctacgacgctgactctatcccccccccttccaccccccggcgttcagcttcggtgcggccgagctcagcccagagcccgagctcgtccgccagctcgtgcccgtctggatggaggacgagctcaggtccaacggcatcgacgtcgacaattttggtgcggtcccgtccccgtcccttcctcttccaccattagccgtccgcgctaacaccctcgctggctttgctttgcgcagtcccggtaccactggacgagctccggctctcgctcgactgaggctgtccccgttcatacgcggtcggtcagtcagcgcgaggttcccctctcgcatcagttccgtcccctaccatcaccttctgtatcactagccccccttgccggtcttctccctctctccccccatccctcaccccttcatcgcctcgcctcgcccgctctacgttcgtgtttacagtccaagctctgctcaacccgcttctcacgatcacgcccctacacctcccctaccgccttctcctgcttcgcacgcgattccaaatgacggctcacgaccccaaccctggcgttcaggcctctcgggctacaaaagaagacggaggggggccagagagaaagattcatctctgtatatccaagcgcttctacgactcctcccaagtaaggcctgcgtaacccgcccgatcgtcccacacccactcctccatcgccctcaacgcctcccttccccaattccacgcctcgccctcgccctcttcgcgctcaaggaagcgcacgagccggctgtttgacggcgtgatgaagccatcggccgtcgcgcgctcgatttgctggcggaggggcgtgtagaagccggcgacgttgaggaggaggaccttgcgcttgtggatcgcgagctgggaccaagtagccatctcgaagagctgtgggcggagacatagagggtcaggcgatgtcgcgcgggagcggatgagctggagaggacaaggaacggacctcttcaaacgagccaaagccgcccgggaggacgacaaagccgccgggcgagagcttggccatctggagcttgcgctgtatccaggggaaagaggtacgcgtcgtgtcagcctggttgaatccgaggttgacgaggccgggcgcaaaggatggggaaaggcgacgcacagcgtgcatcgtcgggacaaccgtcgtcttccccgccccctcccgagtcagcaagaccttcttcttgtatccctcagccgcaccaccatcgacgagcggtgcgaccgcttccggctcggcgactggctcaggctcggcgccctccaccgcccgacccttttcgcccgccggcgcattcaggaacgcagaggggatgatgccgtggacgtcgccgcctgcctttgcgcaggacgaggcgacgacgcccatcaggcccgactggccgccgccgtagacgagctcggttgaggcgccggcgagggcccggccgacggctgcgcggtgcaaagggagggcaacttcagtcccactaggtcggccaggccaagcaaagcagcgaggggacacacactcagcggcagcacggtactccgggttggagccgaacgaagagccgcagctgaagacgcgcgaggaggagcagttcagtctcgaggcgagagcggtcgagcgacccgggctttcgggccggagctgcccgaccttcgccgaagcggcacatcgtcaacgcgcgggactgacaagacacagatggcgggcttggcatccgagccgttcgtcgccgctggaggtacagaggtggtcattcttgggctttgaggatggggaaaggagagctgatgggcgttcggagggtcgagagcgccgcctgtcgcgcagggttcttgacgacggccgagtcaggaagctcgtccgaatcagacgagtcagacttgacctcactgaggcacaggccctgcacagcgcagtctggctaggcggcggtcgttccagctgacgccaagatgagcagcctaggtcagatcgagcaaaagaggacgaatcatgcggcggacgaggtcaggtcgtcgtggctgcgcgctcagcgatccttcacgcagtcgacaccgaacgccgaggcatgctcattttggtcgactgcgaagacgaggatgtcgagcccgaggaagaagcgacgtcgttgcagagattcaccgtcgtgcgaagccccaaaagcaaagagcctttagaagggcaaaagatggtcttgcccgacctgagaatcgaactcagagctgaggatggcttctttttatgagacctacgttttaccattaaactagtcaggcatcttggaattcttgggcaagcaagtgtggtgtgtatctcacgtgcaaaagcgaagccttccgggctcgcttcctgctgcttgtcgagggcttctaagtatccctgctcgtgcaagagcagcccagagacgtccgctatcgccagcatcttgcctgggtcgcctgctaactgcgagctcgctttggcctcgagggcgacgtcgagcacgagcctctccgccccctctctcgccgactcgcactctccgacgcccacctcctccttttctcacgacacaaccccatctcctcagtctgccacctgagcatcgcagcagattgagctgctacgatcagcctcgtcgctcgttccgtccgccctcctgcccctctcttgagcagctctcgcctggcgccggccgcctcgtccgcagctcgactcgacctcgtccgcccagcagcgcccggacccgccggccgacccttccggcttcagcagcagcccgcaactctcccttctgacgcctagaggacgcaccttcgagctctccgccgccatggccgaccgcaacaacatcaaggtcgtctgtcggtgcgtcatgtcgcctcatctgccgggggccttccctcaacgacctccccccaccctttgagccgaaggggctgatgcgaaaccgtctttgcagcttccgaccgttgaactcaatcgagaagcgcgagaatagcaaggttgttgtcagcttcgacgacaacctcaagacagtcggcctcgtcggcgagaatgcgacgctggccggggccgagaaggcgcgtgctcgtctcgagtcttgcttgttgcgtctgccggcagcacgggaactgacttgcggcctcttgtgtcgagctcttccaggatggtttcacgtttgaccgggcgttctcgatggacaccaagcagatggagatctaccagtacggtatccaggagacagtccaaggtcggtcctcctctctgcttcgcccggccggccggccagccggctcgaccgaccgaccgcctcgttcgcggcgagcaacacaaggccgcctgagagctgactcgctccctttctcgcttcgcgattggctcgcagacgtcatgaagggctacaacggcaccgttttcagttacggccagaccggatccggtgcgtctctgctgcggcctccctcagcccacggcttgctgactgcgcattgagcctctttaacgtctcgcaggcaagaccttcacgatgatggtgcgccgcgctctcagaggatcctatctctctgtcacagagcgacgcgcctgctgacatcccgctaccacctgacagggcgccgacattgacgacgacgagctcaagggcatcaccccgcgcatcaccgagcagatctttgacgaaatcattcagagctcggccaatatcgaatacatggtaaaggtgtcgtacatggagatctacatggagcgtatccgcgacctactcgcccgtacgtctctctctctccttgcgcggggtcaagggagatgactgacgcttcgctctaccggccgcctcctttgcagcccagaacgacaatcttcaggtccacgaggagaaaacgcggggcgtctatgtcaagggcctgacgcaatacaacgtctccgaggcggccgaggtctaccagatcatgcgccagggccaggcgtcacgagcgacgagctcgacgagtaagtgggcggcgcacctcactcctggcccccttctccaggactgactttgcgcccgctccagacatgaacgccgagagttcgcgctcgcactcgatctttgtcatcagcatcagccagcgcaacgtcgacacgggcgaggcaaaggccggccacctctacctcgtcgacctcgccggatccgaaaaggtgcgtctgcgcgctctcgcagacgccatcgaccgactgacctcaccccgttcgcgcttcgtcagatcggcaagacgggcgcgaccggccagacgctcgaggaggccaagaagatcaacaagagtctctcggcgctcggcatcgtcattaatgccctaactgacggcaaggtttgtatctaatcaggttaccctcttgaggggacgcccaagctgacctcctgactcatgccgtatcgcagtcggtccatatcccgtaccgcgactcaaagctgacgcgcattctgcaagagtcgctcggcggcaactcgcggacgacgctcatcatcaactgctcaccggcgtcgtacaacgagtccgagacgctctcgacgctccgcttcggcatgcgcgctaagtcgatcaagaaccaggcccgggtcaacaaggagctctcgctgcccgagctcaaggtcgaactgaagcggacgaaggagtttgtctcgcggctcgagcatgaggtcggccgatggcgcaacggccagcaggtcgaccggtccgagtgggcctcggcgtcgggcagcgggaacgccccggccgtgcctgtcatgccggcgacgccgacaaactcgagccgagggccgacgcccgtcaatgcgctcatcgacggcctgaaggacagctccagtcgaccgatgacgcctggcggcgcgctcgacaaggacgaacgcgaagacttcttccggcgtgagaacgagctcaacgaccagctcgcagagaaggtcagtcctccctcccggcaacctcatctcttgccttgactgacagaatcattgtgcatgtctacccaccaggaggccgcactcgtcgcgcaggagaaggcgcttcgtgagctgcgcgaggagctaacgatggttcgcgagcaggagtcgagcgcgtcgagggtgcgccagaccggaccaagccgtaccgccatgccatcaaccactgatcgtctcactgcttgcgctactcacaggaactcaaggctcactcgaccgacctaaacgagctgcggctcatcaaggagcggctcgagtacgacaacaaggaggcctcgatccaggtcgacacgctcaaggagcagattgacgagaacgagcgcgacatcgaagacctccggaagcagatggaagccctcaaggttagtgcaaaggatgcggccgccgaggacaaggagcgccgcaaggccgagaagatggcggcgatgatggccaagttcgacgccgtgagtcgacttgctgcggtgccttcgagaatcagggcccgcaagctgacctcccattggctaccaggagggcactctatccgagaaggaggacgccatccgcgtcatgctcgccaagctgaacgcagtcgacccagaggacccgtcgaccgctctgtcgcaggacgacatcactctgctctaccgccagctctcagaacgccaggcgctcctccgcgaggccaacgagaagcttcgccagacgcaggaggatagcgaggccgtcagcaggcgccgggacgagattgagcagcggctcgagagcctcgaagccgagtatgaggagctgctgggtacgtcctaggccggccggttctctcgactgcgtgcgctgacacaccttctcctacagagcgcacgatcaaggaggaggaggaaagtagcgccgacgtagctcagtcgatagaggatctcaaggcaagcctcctctccggctcagttgcaataccagttctcagctgaccctctgcgccggtacctcctcttagggcaagctcgaggcccagtacgctgccaagcgcgacatccagctgagcgagatcgcggacctcaagcaccagctcgagctccgggcgcaggagctcaagagccaggcgacaacggtcgagaatctcaagggcgtgaacgaggagctcaaggtcggcgatcgtttgatgatgagtgtctgaggcctcgactgacgattcgccgatgtctctccacttgcagcgcgcctttgctgtctcctcggccggcatcgaggggagcaagaacctggccgagagcgccaaggacctcgagcgcacgcgcaaggcgatcgcacttcagctggccgactttgagggctcaaagcggagcctgatgcgcgacctgcagaaccgttgcgagaaggtgggtctggtcgaaaagtaggctggctctcctcgaacaccggctgatcgtgcgctgccgctgcgtctccacacaggttgtcgaactcgagatccagctagacgacctgcgcgagcactataacacggtcatcaaggcgacgaactcgaagaaccagcagaagaagatggccttcctcgagcgcaacctcgagcagattgcgctcgtccagaagcaggtctgtccagattgattctcgacgacgttagcttgagatactgactcccggtcacgcgccccccagctcgtcgatcagaacacggcgctgaagaaggaggctggcatcgccgagcgcaagctgcttgcccggaatgagcgcatcatgaacctcgagcagctccttcaggacgccgaccggcgacttgtccagcagaatgtcaagtttgagcagcagctgatcgcaatgaaggaccggatcgaggccgctcagggtgcgtctctgcctcgcgcttcatcgctcgacccaggcgctgaccttcacttgcatcccagcctcccggtcaacggccggccctaccttcaacaccggccggatcgccaagcccatccgtggtggcggcgggccctcgcccggcgccatccagctgccaccaacgacgaccatgtcggccgccggcgccctgccgggctcgtccctctcgcgcgtccgcgaagacgaggccggccagaagacgagcacctcgcagaagcgccagtcgtggttctttgcccgctcgtgatgacccctttccccgatcaatagattaaggccagccggactagactcccggcgaggtcgacgctgcggctgtgtagcacagaccctcaaccgcactgcgaaggggcacggcccacctggcaaccctttgggtcgatcgctcgatcggccgctcagcgcatgtcgccgtcgcgtcgcgcctcctcatcacctcacgaatcgcatgtgcatcctgacgactaccatccgtgcaggtcgcatcgaccgacttgtgactcacgaccgagcgaaaagggggcctcgctcatcgccgacctggccgactggacgatctcgatcttccagcggagggagcgcggccaatggtgggcgagcggtcgcacgcgttggcgctctgtcggctggctgcagctggccgtcgaagtcggacgactctctcgctctctttctgctcccggctggctggctcgctgccgcctcccctgcggctgcctgtctccaagctttgccagggcgatgccgctttggccgcgaggcgctcgcgtctttttcgtcggcctgggtgctgcgcgcgacagagtctgctgcctcgtctggctcgtcctcggagggaggcctgcagctcgtgctatcagaagtaacctggcacctgcgcaggcgcgcctccttgccctggaccgagcagcagcagcagcaggcaggagcagaggccgccgtctcgtggccggccagcgaagcctttcaaatgcgcccgggtctgccccgcggtgcccgccccttgcgagtcagcccacccagccagccagggccagggccgatgagatcgatccatccttgcctctccttcctttcctcccaacacccacctgccattcccacccaccaccgcctacacctcctctcacctccgcaatgacctctgagcaccctcgcatcgtctccgagtcgggctcgtcgaccccggcccagcccgacatggcccgccgcgcgaccggcgccggccccggcggaagcgcctcgtcgtccggcaccttcagcgtcaagaccggtctcgcccaggtacgttccttttgctcgcaagcagaggggatcgcccacgaggatcgagctcgcctcgcctttgcgagcagcttaccttcgcggaggagacgcttgcgatgctccgatgagctctcgtcgtcgtcgtccccttccccgcgttcgatcctttctcgcccagcggaccctttgtggaagtcgactccccaagccagcagagcgctgactcttttccctctcttcccgtgcttcgctcgcgcgctacactctctccctgtccttgctatgtcgtcggtcgtcgacagatggtcagtcgatctctttaccgctgccgtcgccggtcatccgcgcgcagagccgggcaccactttctgcttcccgccctgccggaccgagacctgacttttgctctcctcttatcctccagctcaagggcggtgtcatcatcgacgtcgtcaacgtcgagcaggctcgcattgccggtacgtctgccttttcatagcacgagatcctgcccgggatccgcagcccgctcctgccctctctaccccgggcggcggcccgccccgcgacccccagctccctccacttttgaactaaacggataaagcaagctgacgagccatctccttgctccatcgcactgtcaacagaggaggccggtgcctgcgccgtcatggctctcgagcgtgtcccggccgacatccgtcgcgagggcggcgtcgcccgtatggtgcgtgccacgctcgccagcctgtatttgaactcgtttcgctgacctgcttacctcttgcacgccgcagtctgaccccaagatgatcaaggagatcatcgaggctgtcaccatccccgtcatggccaaggtgcgtcctcgtgttcgcgctttgccagccggctcgtcgctgatgtctctccgcttctcaggtccggatcggccactttgtcgaggcccagatcgtccagcagaccggtgtcgacttcattgacgagtccgaggtcctgacccacgccgacgaccaggtgagtcaacctgtgcaagcgcctgatggcagcgagcggctctgaccacggtatccgtctgtccgcaacgcagcaccacatcaacaagcacgctttcaagattccctttgtctgcggctgccgcgatctcggagaggctctccgccgtatctcggagggtgccgccatggtgcgtgctgcagattgactgctgagccgtgggcttcctaactgaccagccgacgccgcaccgctctccagatccgcaccaagggcgaggccggcaccggcaacatcgtcgaggccgtccgccacgagcgcagggtcatggccgacatccggtgcgtctcggccagccgcacagagtccgcgccgcggtgtttcgacgactgacggcatgtgctctctttctccagccgcgcgtcggcgatgacggacgaggaactctatctgatggctaaggagctcggcgccccgtaccacctcctcaaggagactgcccggctgaagcggctgcctgtcgtgcgtctgccctcgacactcatgttgctcagctgcttggcgcgctaaccttgtcctctctctcgtctcgtctcatcaggtcaacttcgctgctggcggcatcgccaccccggccgacgctgccctcatgatgcagctcggctgtgacggtgtcttcgtcggctcgggcatcttccactctggcgaccccgtcaagcgggcgcgtgcgatcgtccaggccgtcacccacttcaacaaccccaagctgctgatggacgtctcggaggaccttggcgaggccatggtcggcctgacgatcacgcccgagatgaagggcggcctcatggccaaccggggcgtctaattgttgtacacgaaacggacctctccttggcccttgctctacaaataaaaaccggcagcatgcttgtgcttctcgccgcccgacgacgaccgaggcgccggctcccccctttactgctgccgcgtcgcccgggcggcctcaacggcctctccctcactgctattttctcgacggcagcagtctctatattggatcacgatgagcccgatgcacgtcttttcacccaaagcgagcgagcggtggcattcttggaggagggttagccgtcaagaggaggttgcgaaacgcctgatcgtgctcggagcacgacaacacctcgcgcaagcggaccaagccgccgctgccggaagcacgagctgccgggctgatgagcttcgtgagttgaccttcacacccaccacccccaccgccaccaccaccacatccacaccttcctatcccatctcgtcctgctaggcagcgggagaacgatggacgtccctgccgccgccgctcagcaagtcgatgccgccagccagtcgacgaatcccttcgtccgcgactcggtctgcgagcgcccgccggccaacgcagagggatttgacggcaccgacggctcgaccgaggctgatgtccaggcagacgactttggcctctttcgcaagggccgcaagctctgtatccggtgcgtctcttccgttcatcttggcgcaacacgagagcatgttcgggtccgctgactgccgtccttctcctctccggccggtggctgctgcgtgctctgtttggcctcgcaaccgggttctcctcctctcgtcgtcgccaggcatgagaagatggccgaccggggcgtcaatgcccagctgcaggcggtcagtccggctcttctttacctctagaggcaggtcaaaggagcgctcaggaggtgctcactggcgacggccgagctcgcgcgagcaggtcacctgacttgcctccggcgggccggctgtcgacctgcctcccctgcctttcctctcgctggaggtcgctacagagcaagtaagctgatatctcaaactgcacctctgccagtcgctcgatgctctccccttggccgaccggcaagcgatcaacggcgtctggtcgaccttctcgtcgtcaagccatccgcggcgcgagattatcctcaagggcctcttgaccatgtgctgcttttcgcaggtccgtttccacctagacagtgccgccggaggagtgcgcctagctttcgatgctgacaactttgctgcctctgacccagctttccatgctctcggctcagacgcacgagctcattcggctcgacccgtttgccctctttccgcgcgaggtctcgctcaaggtgctctcgttcctcgatcccctcagcctcggcaaggccgtccaggtctcgcgcgactggcgagagcttgccgacgacgatatcctctggcgaggaatgtgcgcccagcacatcgagcgcaagtgcaccaagtgtgcgtcaacgcagagctcgcctctctcgccccgcgtcttgcccttgctcaccctctgccctttttcctactctcaacaggcggctggggcttgcccctactcgagcggaagcggctccgcctcgagattgacggccactacgaggagtcgacgccgtcctcgccggtcggcccgagccacccgcacggtcacagccaccaccatcacgcctccgacagcgcccagatggcccaccaccaccaccatcaccaccagcacgccgacgcgccgcacatcccgaccgtcctgtcggccggccccgtcgcgagcggcagctcgtcctcgtcatcgacgtcgcgccaggtcgacagcgcgacgctcacgcccaaccggcgcaagcgcgggacgcccgacgcctctgcctcggactcggacgagccaggcccgtcttccaagcgtcggttgacgccgctccggtcgccctctggctcgccgcccccaccaggaacgacgctcgtcccgctgacggcggcgaaggccaaggccggagggccctgccggacgctcacccggccttggaaggacgtctacaccgagcggctcatcatcgagcgcaactggcgcaagggccggtacgagagcaagacgctcaagggccactcgaacagcatcatgtgcctccaggtgctcgagagcgagagctggatggccgctggctgcgacgccaagggcaaggatcgggcgaccaaccggtccggcccgagcggcgtcctcatcaccggcagctacgaccgcacggctcgtgtctgggatctcaagtcgggcaaggaggtcatggtgagtccgcgcgccgacgcccccgacccgcctcttgatcgacggtcagctgagcaccccctacccccctttgcaggtcatgcgcggccatgcacgcggcatccgggcgctccagtttgacggcgcgatcctcatcaccggcagcatggatcacacgatgcggatctggaattggcggacgggcgcctgcatccggacgctcgccggccacaccgagggcgtcatctgcctcaactacgacaagaatgtgctcgcctcgggcagtgccgacttgaccatcaagatctggaacttcagagacgcctcgtgctttacgctccgcggccaccgcgactgggtcaactctgtcgtcctctgggactcgatcgcgcccgccgcgccctcgtcgtcctcgacctcgtccggcacgacggccgtctcgccgccgccgcacgcgtcggccctcccggcgacaccgaacggcggcatcgacgccggcaagatgctcttctcgggctcggacgacggcacgatccggctctgggacctcaacacgcgcgagtgcgtccgcgtgtttgaaggccacgtcggccaggtccagagcatgaagatcctcgtcgtcgaccgcgactcgcgtgacgacgagggggccgagcttgagcttgccggccaccgctcaggagggcaccgcccggccccgagcgagacgacgtcgtcgtatgagcccaatgcgctcggcatcgttggcccgccttcgcatccgctcccgtcctctgccgcacacggcccgccgcccactccgctgggcccgagcgcgagctcctggcgcctgccaccccagccagacggcgacgacaagcaggtcatcctcgtctcggcctcgctcgacaacacggtccgcatctgggacattgagaccggccggtcgaggaagaccttctttggccacatcgagggagtctggggcgttgacgccgacccgctccgggtcgtctcttcgagccacgaccggaccgtgaagggtgcgtcggtcgaccctgtcggcggtgcgctctcagtcctgctgtgctgacccctgttcaactattccctccagtctggtcgcgcgacgacggcaagtgcacgcagacgctcgtcggccaccgaagcgccgtcacgtgccttcagctgaccgacaccaagatcatcagcggcagcgacgatggcgaggtccggctctgggactttggcgccaaccactcatgaggctcttgctacggaccgttggttgtaggatatctctccttcgcaaggcgggggttgtactcttcatgagctgtgacgacacatggaagcgtcttctgcttgctctcgtggctcgttcagacggtgcatgcacgctcgggcgcaactgcgaccgacttgctcgcgtcactggccgagtcgccaaaccaagcctcgcgttccctctcgaccccaactctcccctcccccgccctgtcccaacctttaccagccttgccatgtacatggctcctgtcgctcggacagatctctctcccgagctcgtcgtgagcttggcctcaccgatcaaggtgtccgtcccaagcttgccggcctcctcccgggccgcagaagctgacttccctccctccctctcttgttgctgatgggcaggccgaccaactcgccctggctcgaccctcggacgagcctcttctacctcgtcctcgtctcaatcacgctccttgccatcccgcccttcgtgctcgccgtcgtccgggtctggcaggcggccaacgtctacctcgtcagccggcgcggccaccggtcggacgagacgtcgccgctcctgtccgactcgctcgacgcagcagccgatgacgacgagacggtgctcgtcccgccgccccgggccgagtcgcgcgtcctcccggccgggtcgggctcgctctcgggcgacctccagcttcacgttgcctcgctcggcggctgggtcgtgtttggcctgcacctcctccggctgctcgcgtgcctcgcgctcgtcggcctgacgctctgggcgatcgtcatcgacgccgaggattcggctgacccagaggacggcgatggcgttagcatcttgaagaagggcggcaagcacggccacaagaagggtcgcaagggcgagcgccggcgcgaggcctttgggcgcgaggagatcgtcgagatccttcagtgctgcgtctttgtacgtcgtgggccttcgtctgaccgtctcttgacgattggctgaccgagcctttgatggatttcctgcaggtctattgcgccatgctcgccctcgttacggccatcttgccccgcctgcgcctgctcaagacgcacctgtcggtcctcctgctcgcggccttcttccttgcggcgtaccgcaacctgctcccgctcgcgctcggccgcaagccgctcgacattgtcctccaccacctgaagggcatccacgacccgctctgggacacgctcgtctggctccgcgtcggcctgcttgggctcgccggcgttatcctgcccctgatcctgctcctacggtgtacgtctttgatcggccctgcttgctgtctctcctcgcggcagctcacatcgtcgccaccctctttcgcccagctcccgagaaccggcacacgctccgccaccgcccgctcgccatcttccggcacagggaagatcgcgctgctgtcgccgaggagtagactcatatcgggtctcaagaagagctgcctcagatcctcattggcatgcgatggctgttgcccggtggcgcctgcagttgtccagagcgagcgacgtattacggcagcgctcaagacgtcggaccccgcggcaacagtcagacgacctcgcttgtcgagggctccggcgagtcgaacaagtcgtcatcgaagaaggcgagcggctcgaaggattgcgacggtgtggcgaggccggtctgcatcggcgaagcgacgccagaggccggttgcagggagcttgtctgcgagcttggggagcgaatctgacagggcgaggcagatcagtgacagaaccgtgctaaaacgtagaggacgcacggccgtcaaacgctttggccgaagcttgctggcccaaagggactggaggccgccgacgacggtaacctcaaagtcctcggttgtccctttttctgccgtctgggcaacgtcgtcgtcgacgcttgcgtcgtcttcgtccgagtcgaaagccgacaaatgagcagagcgcaagggcaagccagggcgcaagatgtcctttaagctttgctcctggcggccctcgaagtctcgcagcccgtgagcgagggcctgcaacgtaagcggttggtcagactaccattaacgcgtgacgactgaagagcgcaacgcacctcatacagccgcttggcctccttcttgcgcagcttgtccgtcatgttctgaatgatcgttcgcatggacgctgcgacggacgggatcgacggcaggtcgttggcgcggagagcggcgtacgggccgttgaagacgagcgggaagtgcctgagcagcagagcaatcagcgccctctgggcatcggcagccatacatgcgatccgtcagcactcacttgacgaattgactctggaccatgcgtaagagacaggcgtcgagcgtccgtcgcatggtctgcgcagcctgcggaaggtcgctggccgaggcgagagcggtgtagtcctcggtgatctgcttctgctcggcagcgaaggcgtctgtgggaaggaggggtagtaggtcgcttaacagtcgtgacaagatgggacgactctgcacacctgctgtcgccttcttgtgagcctcttcatcactcagggcgtcggtcgcgctgtcgccagccttcacctggccttgcgtagcctcattgcccgccttctgaccctttcgagcggccttccgccgcggaggcttcgagccccaggacagctggatgtcgagagcggagagaaacgccagaggcgggtcgcccggaagatgcttgatcggcgcgcgggacgtcgtctgcagctcgactgcatgcatacgaggaatatgaatcgctcgtcagcagaggggtgtatgcgtgccgaatcgatcagcagcgggcgcacagcggccgtcgtcccaaggcaagacttgtgcgagaccgaggtccttcgcgttctaggtcaagcgcgagtctcgatcagcagtctgaggtgggcggggcgaagggcgtcctcgccgacgtacggtcgcaaagatggccataagtcgctcgctcgcccagccgagcgtcggcagccgctggcccctgacggagaggccggcttggacgttgatcgcgccaccttgcgctggcgagggatagacagcggccgactgtgccacttgggcgagcttggagtggcgtgtgcccggcgaaggtgcgagaggtagaagcaggtcaaaggtgaccttgagccggagcggcagggtggccgctgccgaaggcaacgaggtggtctgcgcgggcaggaccggttgctggacgagagatgtgctgagcgaggtcgggtgcgttggagaagagggcatctcgagggtcgacggccgggggatgatggtggtcagaggggtcagcacgcccagccctcagctggtcagccactgaagcgcgcgccacgcatgcagcccttcgcagcccctcctctgtctgcgacttggaaaggcgttcaatccatgtcgacctggagcgcggccgctgcggccgccttctccgcctcgagcgtctccttctctcggagccggtcgtcgagctcttgctggccggcgaccggcaggtgggcaatgacgacgccgttgcgggcgccgtcggtccgcttgaggcgcatccaccggccgagacgaggctcctgcgacaccgtcgcgacaagcagaaggccgagcttggcgtccgactcctctgatgccgaaggctcggcggcatggccgttggtgagcgggagcgagtcggaacggaagcgggtgaagtcgacctggccggccgagggcgtgatgagctggagcgaattgacaaagccctttgccgggatcgtcaacaacgccttgaacgacttgaggtcccttgcgatcgcccagacgcgaatcgtgccatcccacgagccggtcgcaaaagtgtcgccgtagggcaggcaggcgaccgacgtgatccagcgagccgtgccgatcttgccctcggtctcagactcgtgcgtattgacgccgtgggcgaggtgctcgatgaagaccggcttctttttcgttatgctccaaagggcgacggcgctgaacgagaggaacgcaagaggtcagcgtgctggcactcgttccagcgacgagcaacacaagacgcacccagagtctccgcccgagatgaaatgctgctcgtcgaccatcgcgacgcagtcgatgctgccctcgcggaagcgctccttctgcttgccctcgcgacgcttccggcgctcgcgcttggcccggccctcaccctcgcggccctcgacgacagccttacgctcctgctcgtcgagcacgtcgtcgtcgtcctcccagacgccctttgacgcgcctccgccgcggaagacgagctgcgactcttcggcaaccttccagtagcggaccgtccggtcgcgtgagccggccgagacgagattctcgccccgaagagccgagacggacggcgagccgtcctggtggccgtagagcgattcaagatgagagagcgttgaggtcgagaagatcgaaattgtccggtcaagcgacgacgtgtagaagttttcggtgcccagctggaaactcagccccttgggcagcgaataacagcaggtagcaagcaggttagcactgtgggcagcggcggttcgtgagacggccggcgaagaaggaggacgcacggtgatcgagtcgcggtgacccttgagaccgcgcacccactttcccctgtcaccctcgacgtcccagacgccgacgatgccctccttgccaccgctgacgagaaagcggccgtcctggctgagcgccaaatcccagatctcgtctcgatgaccttccggctggacctcgttcccgagcgtcgactcgcgctcgcggcccttgcccttcttgaccttctcggcccggccggcgcgcggaaagtgctgcgtcagtcggccagtcggcaggctaaacttggcgatcgccccgctcttggaagctgtgtagagatagggcgagccgggtgcgacacgggccgccgtcggcggaagggagggcagcggcagaaagtggacggccgggaggagcgaaaggaggctggagacgtggatgtgcatcttgggcgagtgcgaaaggatgtcggtctgcagccgggcggccatgatttcccggtcaatctcagcagcgtcatacgagccgtcgtctgtcaagaggagacggcaagaggtcagcgtgcaagttcaaaggaagaagcgaccacctctgcgcagctccaggcagcgcaccagcctcttggcgatggcgatgatcggcagcagacgtccatggcggccagagcgcacgatgcgctgccggacctgacgagcgcagtcggggcagaaaggagagaaaacgcacccagctgctgctcggcctcaaggcctttgaggtactcgcgcgcgatccgcagacgcttctcgccgcccgtctcgcgacgctcggcgtcgcgctcctcctcgtccgactcgccgccacgggtgtcgcgcgtgaggtccatgtcctcaacgttgacatcctcgccgccgtcatcagacgagagctcctcgtcgcgcttgccgcgagagcgcttgacgggcgccgctgctggtcgacccttgctcgcagtcgacgaggttggggcggcggtgaccggccgcttgcgcttcgacgacgacggcttggcaaagaacgagtcaccggccatcctgctgcaagtgatgaaggctagaaaggaggaaaggagaggcgaggtaggtggattgctggcgtcggtcgtctgggtgcagcagcgaggcagagctcgctcgctctagacgtcgaaatcgcctcgccgcgcagtgcgattcgcgctgacattttctgagcgatgcaggtcgagagcaagcgatgcagacgtggagggaggtaggcagactgcccatgcgggctcgacgcgacgctgcctctcgttcgacgacccgacggccgtctgtctttccctcctcagctcgcctcgctttccacttctcgcccgactgcatggacttcatcaggtcagtttctgatctgaatctagactgcttgccggcttgacagctccaccggggcgagcccgagctgacaacttgtccctgcccatctcgtccggcttccgcttatccgaacctccgccccgcttgccgcccatcccctcttttacgctgaactccttcccccagagccctctcctggagactcaacaaggccatcggcgaccgaaacaagagcttctttgacgtgcgtccctaggcctcatttcgctcggcatcggcgccgagagagctcgctctcgggcatcgccgctcccagccttgatctcgcaagagctgaccttcgagagccggcctcttacagtccttcctcgcccgcgtcgaagtctgggaccgcagcccgatcgaggcaatgttcgtgtcgtctcgactgtctgccgctgagctggagctcattgtccactgtaccctcgcccgcagcctcacccttttcaaggacctcttcccgctcatcatcctcgcctgcggcctcatcttcctcttttggaaacccgagccgcctgtcgacccgaacgcgcccgtccccgagcctaaagagccccgcgtcgtccttcggcccggttcgcgtgccagcgtcgagtacaacaagagtctccaacgcgagagcaagctcaacacgctcggacctgccgaaaagaactcaatcgccgtcagtccctcgtcagacctttcttgcttaggctacccttccctgactagccctttgcctcacgcgatgctcgaacgccaggagtctaccagcatgatgtccgcccctgccgcctcgctccccgagccgctcgacacgccaatctcgatctcgaagctcgctgagcacactggcaccgactcgtcgaagcccatctatgtcgccataaagggcaccgtctttgacgtgacggccaagcgcgagatgtacgggccgggagggagctacagcgtctttgccggcaaggacggcagccgggggctcggcatgagctcgctcaagcccgaggatgccgtgtccgactactcgggtctcgacgataagcagaccaaagtgcgctcaagtccgatcgatctctgaaagctcgtcatgctgatcgaccccttctgtatccttcacagacgctcaaccagtggcaggacttcttcagcaaacgctatccggtcgttggcaaagtcgttgactgagtcgcgagctgctcttccaagcgctccgctcatgagtgcgagcgactcttctctcaccgccttggcttgcggctcctctctcacctcctgctggtcttcgtgctgcggttcgatcaatctcatgcctcattctctgcactctgccgtgttggaaataagcgaccgtctcgccctgcagtcgccgcccccatgagcgcaacttcgagcgacggccgcgcaagttgctgcgctcgcacaaggccgagcgaacgcgccctgcctccgacgtcgaccgtgccttgtgctccctcctgccagccaccgaacgtcctgcttctctcttctcgtcgcaaaccctagcgccctggcctttagtccgatcgtatccaccttccgatcgaggcgcgggctctggaagggcgatgaataattcgcaagtcaaagtgttcgtccccgctcctcgctcgttccgccggcacgcttccattccctcctcgaacagtccgaggcgctggcatgcctccattcgcacgccgttgctgattgagctgagcatctcccttcatgcagcgtcttccgcgctccggctaaccgaggcttcatccaaggtgagtctcattgctgcccgcgccctcctcgcccgtcatcggagctcaccccgtcccttcctcgctgactctgcttccgtcgacatccctcgccaggctacccgggcctgcctgatccagagccgacacgcgatgcgcggcctcgctgtgccgctgccggcgtacgtcctcggtcttgagcaatccatgaaggatgcggtcgggctcactcgcgctcgcccccttggctcgccagacgattgagctccgcatggccaagccactcaaggccgaatggcttcgtatctcgctctacaagaccgagacgctccccaaggagggtgcgtcgtctctcgcggcttctgatgctgagggttaggctgacctcattcgagacggaggacagtcggcgggcccgtctttcgcgagaacgtccacggcgcgcaggccctctggtcggcaccggccggggcagagtacggtattctcgattcggtacgtccttgtcgccgagtgttgacctcggctggagctgacgacgcattctgtttggtctgcgctcgttgggcagaaagacttccccttctcgcttgccgtcccggcgcacttgccaagctcggtcgacatcccgcccggggcaggtcgaggcccgcccggccaggcgctacccggcatcgcctactccctcgaggtgaccctaatggagcggagcaagaagaagtgcgtccggatgagcgctcgcttgagattgtagtcggctgacctttgttgaagcatccccgctgcagaggcctgctgcgcaaggagaatcagccgctctcatccttcgtccagccgattgaggtgctcgcgcacgacctccatccggcctggccggcccaccaaatcccgaagcagctcgcatttgccaccccggccatcacgttgacgctcacgcagctcaacgcggccctctcgcctggcgcgacgctctcgttgccgctaacgctcatgctggcgccctcttcgcctactggcccgatcgaggtccggagtatcctgctcacgctcgccgagacgaccaccttctcctcggcgagcaacgcgctcggacagcgccagaaagacgtcgcccagtcgcggttggaggctgcgccgcgcgagatcctttcgccaggcccacagggcggccggtcctggacgctcatgctcggcctaccgggctcaaaggcccgtggcgagggtccgctcggcttcaccgtcaagggtggtcacatatctgttggctacgcgcttagagtcgacgtccttggcaacgtactgcatcgaggagcggccggcctgggcgagcacggtctcggcgagttggtcgcgagcgcgacaatagacgaagtcctcatcgactggacgaagggcggcagagaggcagagctcgtccggtacgtcggtcgtgcccgcttggcagccgcttttcaataccagactgacgtgttccccataatcgacggctgtcccccagcgagattggtttcgttgccagtctttgtccggaaggtgccttgtctattgctgcgacggccgccacctcagcgcgggctaccagtttctcaggcgcgtcgacgtacacccgctcgcagtctatctcggcgccggtcccgtcggcaccttcaccgatgcagcttgtcaatgcgacgccctctccagacgtctcactagcccaagcgcccgccacggctgcgccgagccctccgaaatcgagtgctgaagggcccagtcggcccacaaacaaccggctctcgacaactatttcgttcgagcagacctacaactcgatgctgcgtgcctcgcctgcgccgacgaccaatctgcgttcaggcacggcctcggtctacctccccgaggagtccgaattctttggctcggccatcacgccctccccgcctccttcgtgcacagccttctcggagctcggccacggcacggcgccagcagccaaggcttcctcctctggcaaaaggtacccgtcggcgcaggaggagaaggcgcaagcctttgagaaagccaaagcggccgtggcaaggacgcagaaaggcgtgccttcggacgaagctggatcttccccgctcctggccggcgccccaggttcctcggatggaccagctgccacgacaccgtcaaccgtgcccgcctgggagtctgctgctgccgaaaagcagcgtctgtttaaccagcttcaaagcaagacatcgatctcgaaggctggctcggcctcgccgtcgtctgcaccggccggctcgccgggaggtggtagctcagtcgttcagaacggcgctgccacttcttcggttacccgctcggccgtccctgttgcaacgtccttaccgacgttcgagacggccgcgcaggagaaggcgcgactctttcgagaggcacagaaccgggcgtcgaacgcgcaagcggtcctggctctcgctccagatccaacaagctcctcgtcgacttcgctcctcgccggttctgcagctgtagctcagcctccagccttcgaatcggcagcggacgagaaggcgcggttgttccgcgaggcccagggtcgcgctgcaggcgcttccggctccagcagcaccgcatcgaccaaccgaggcccggtcgacagcggtcggccgtcagccgttcctgccgctccgactcacgagagcgccgcagaagagaaagcgcggctcaggtggcaattcgagtctgcgcaagcggctgtcgcttctcgtcacggccagctacaatcttcggcgtcgtctacctccttctccacagacgctgcgcctcacggcgtcgccctcacggcgccgctcattattactaaagcaaaccccgcgtccagctcccgtccaccggccgagggcattcctcatccttcacacgggagggacggcgcgaccttccctgacaggctggtgccgtacgacgccacctacgacggtcggcctcctgtcgcgcagacgccaatggcctcgggtggggttatcgagcaagtgctgacggagaaggtgtgtcctcactataagatattttctagcgacttagcgctgaaactgctaactttcgacttctcgcaggagcaacaaaagcgctactatgacgcacaggaagccgtcgcccggtccgcgctcggctttggcggcagtggctcgtccgcctccagctcggcaccactgccggcctttgttgctcccaccgctgtcgcacctcgcttcgccgccggggaggaacaggaaccgccgaaatggcggcaagactcgatcgctgggtcgtccgacggcaatcacggtcaagtgcaggatggccggacgacgccgacttccactcgaccttctgtccgcagctccgtctcatcggtgccgtaccttcgagatccagaggttgtccgagggaagcagcgcgcgccccggccagagtcggtctactctacccagaacccgagtgccgagatctcccccggagtgcagccctcagctggacctttgcctgctgctcgtgtttcacaggtgccgcctcctccgcctccgcctccgcctccgccacctgatcgaccgccggccgactactctacgcgctacctctacccttcggcggcgcccttcgggatccctcccgcgccctatggccagccgccagcaggcttttggccgccgcagccgatggcatatttcccgccgccagggatggtgccgatgtggacgccgtacggcttcgtgagcgctcctgcagcgccttacggtggcgtttaccctggcgtcgcgccgacctcgccccctcaggcattccacgccataccgccgcctggcagcccgtccgcgcaggggcctccgcccgcgacatgacgggccgtccgtcccttctttccacatacccagtccattcgatgatactctcaaaggatggctctgcacgacggagcgaaaccgcacaaggagggtcgcacatcatgggcatcggagcgataaaggttagcctttccctttcatttgaacgtcatgttcttgttgcccttcttggtctcggccatcgactggggcggccgtttgaaatccccgtaggcgacgacagctagaggggggaaaggaccggggtgcaaacggcgtcaatgtccagagtcgggacgacagcggacaccgagcagacacgcttgaggaactcacgctttttgacctttttggccttcttgagcttgttcgggttgtcttgcttgacgacctggtcgagcccgttcgggaccgccgagtagtcgaatggcttgtccgactccttcgcctcagcagacgacgccggcgcggtcgcgtcctccactggcgacgacatctctcggcccttgcccttggcgtccgccacgacaggagcaccagcatcggccgtcttggcccgcttgcgcttcttctccttcggccggccgacagtaacgatcgcgtctttatcctctgcgggcggctgcggcttggacgctcgcgagacggccggcacaaacggcacctcttcggtaccagggagtgtgaactgctcgtcgacaggatttgctaccggtgccacaggcgtcacgactggcgctgcggaagccggtgccggaggtggcggaggaggctgcggcagggcgcaactgcgtcagcatcgagcgcgaggcaaagcagcggcggaagggcgcatgcaactcacgttgattgacaaattgatcttacccaggaccttcataaaagcatcctcttgtgcgactccttgggaggcagaaggcgaggatgcggcaaacatgtcgctgccgcgggcggcctgtttcgtgccgacagcgccgaagagggagctcgagggcgcgacgtacgatcgcgaggacgaggcgatggcgttctccgtagcgagcgccgctcgcgagctatctgacgaattagagagagaggacgaagcgacagcaggagccttggccgccgacgtggccgtgggctcctggagagcgccccagacatcgacaaccatctgcttggcgggtgccggggctgcaaccgacgacgaggcgacgacgccctccatcgggacggcggctgtcgtggggccggcggctccctccgcctcctcgatcgtcgtccggatgaggtcgacgagctcgtcggcccgtcggcggacaacctcgctccactgctggcccatgaggaaaagctccttgacggtcgtcggcttgcggccggcgaggatgaatagttggtggttcttcatgacgtaggccgtgctctcgtcctctttgcgtgccgtcgagtcgcgccaggcgtgcaggcgcttgtagacggcgccctcgatggccggcggcgtgccgggcgcagagtcgagcaaaaacagcttgttgtactttttagcgagcgagaaccagccggccgggccgagtccgttctcggcgtcgtagatgtcggccgcgaaccggcggaggcacgtctgggccgaccgagcgaggacgtgctggagcagcaggggcgtgtcgacggcaaaggagcctccggcgggcgtcgttggcggcgcattgagcgagggcgacgaccggggggacgagcgcgagatgagggcgttgagcaggtggtcaaagatgaagagaagaaagtgcgtgtcggaccgcgcatagtcgagcatttcctgcggcatcggccggatccgccagtcggccagctggtagcgcttgtcggcgaggaagtcacagtagagctccagcagcgaggcgagcgagtgtgacgggaactctatcgaggcgcaaaatagaagctggtcagtctctgagtcgttgataagtcggccgcctgaaagcgacgcaccgagcaccttggtcgcgtggtaggtgtcgaacatgccgacgacaaaaatgtcaaagttctgctgcagccagacgatgtcgctctcggcgccatggaagatctgtacgggtgaggaatgagagtcagcgcgagcgagaagtagttgaaagagaacgcaatgcaccttgacgatggccgggtttgcgaaaacgcggcccatgtggtcgcgcatagcctcgcggacctcgggcacaacgaggtcaatcacccagtcgccgagaacctcgccagcagcgttccgtgctgtcatctgggcgaggcagaggaagccggcaaatgtccgggtgctgtggtgctcaagatcgaccgcaaggtgcgtcgcctcctgctcgagcgtctcgaccagagcgatcaggcctgcccgactgtcgacaaaggtaaaagccgtgtcggcaaagctcgccggcgggacaggcgtgcaaggtttgggcacgaggagtgaggtcgggtacgtcgggtgcaagagctcaaaggtgtagggatgcggcggcacattgcggtgcgccgcctcgcgccggtccgaactactgcttgcggcagcgcccgggttgatggcctgggcaggctcgacgacaccgacgtcctcctcgggcacggccgcgacatagtcgaccggaacctgggcgtggtgtttgacaaagccgggcgtagtggagctcgagtagacccggaactcggccgtcgggaagttgtcgaccttcggcaacggaaacaggagctgcggcttaggaatatgggcgttgatgatagcctgaggcaggcggccgggcttggcagcagtggcagtggatccaggcacgatcaatttgttctgaaaggaagagggcggtcgtcagtgacagctcgcgtgcgacctagagcttttagagcgcggaacgcacttttgaccgggcggtttcggtcgggatgattgggatcgcgggcgccttaatcttgccaaggaaggtgtcaaggcaggtgtcctgcagttcacagcaaagaagtcagtcggctgccgtatgcgaacgggagaggcgtcggcagatgaaggggacgacgcaccgcacgctcgagcaagccatcgacgccctcggcaatgacagtctcctcaaagttctcgacgaggtcgtcctcctcacgcttgcgcttcttcttggctccgaccggcttttggccgccgtcattgaggtcgtcgacccagctgaggagggagtcgacgagctcccagacccggccagaggcctcgtcgagccggaccgcgagcgcggggtcgactgaccggtggaaggcgaggtccgacttggccggcagggctgccgcgaacgacgtcgtctggtgcaggtgcttctggagcgccggcaggtcgtccgagagagaggaagacgatgccatgatggaaaggcaaggtgggttgtggcagctagagggagagggagctcgacgagctgccgacggcaccccggcagatttgggctgcagggcgcggcggtcgccgacgtcttgcaagccagcttccttcttcgctcgaccccccagctgactttgattggatctccgagtttagcttgagctgccctgactgttgtcactttcgtgcttgcagtacatgtcggggtctggtcggtacggtacatgggtcatccggcaaagggggaagcagccctcgactgcgcgtcacgcacgtcgcgcgcgtccctctcgctctaatcctccgactcgacagcctcccagcctccggcccggcgcgcactctcctcgatctggccgcgcgtccgctggagtcggttgacacgcatgtcgcgcgccatcgcattgacgtctgagccgtgctttgcccggagcgacttgaggaagtggagctcggcaccagttaccgtccgcggacgcttgaccgtccgggccgcgatcgactcgagagctggtcaaaggcgggggaccggaagatgtcagctgacagtgtgggcagagacggaaagagcgcgagagagcagacgcaccagcaacgacgggcgtgtcctcggcccgcgccttgcccttgtcggccttgggcgccgactcgtcctcgctgtcggcaccctcctcgccacccatgacaatgtcgacgacattgccctcggcatcacggacgatcctgccgtagcccttggggatggcgccggtcgacgacgggccagctgcgtcctcctcgtcctcgtcggcctccatgtcgtcgccggtcgacggcttgacgtccttctcgatgcctcctggccgccggggggcaagcgtcgtcatgaggcccatctccttgtagctgaagcaagacggatagattgatacgtcagagaacgctcgagaggatgaaccggcactggacgtagtgcgtgccgagcgggggcggcgatagcgggccagccaggacgagggaacgtacttctgcatgaccgtcttcttcttgtcccaggcgtcgaccaacggctggggtccacggaccgtcaccttcttcgaggtcgtcttgcgcgtcgtcttgaccgtctgccggccggagcggctcttggaacgctgtctgcgaggtcgcgcaaggcacgagagaggtggtatcgtcagccccggctggccagaaacgagcgagatggcaaaaggccgccgctacgcacctgggattggccatattggtgcttagagtgtgaaggagaaggctacaagggacgtgggtgcgttacaggcaggagggcttgacgaccgggtcgtctcggtggctcgctgcgcccaaatctgggagcgctcgcaaatgcaagtcggctcggcggcgaagctcaaaggtgcgcttttcgtccagccatccttcgcaaccaacgacgacgaccctcctggagcaactgtagctgagtgagtatccatccgtgctgcatcttgaccgtggcgacagatggctgacaccgcctacctgccttgcagcattcgcaccttttgaaccccctcccctcgctgacccctcgctcgctccgagcgatctccctcctctatcccttcctcacctatcattatccgaagacgagacacgcccgcaggcagcgtgtcactctcgtctggagcatccaaaagaagagacccccgtgatgagcttcgccaacaccatagagtcaagcttgtatgacctctgccacttgtgcacgtccgagacgagcgtctggcaccgacgtacggttttaagctgaggggtctctcactcctctttcttctctctctatgttgtcgatcacatgtcctctgcacgtcatctgccattcctcctgcgagctcgaagacttgagttggctgtcggagggtgcgctctgaagacggacagccgacgcaggccgacgcgttctccctcgtcgcagctcgcgacccctttcgtcgacctccctccgccagcgaaccgaccttccctcctcttcagcacataacagagcacccgcgagcatgccgccctcgctcctccccatcgccctcttctcctcgggctttcttgtcggcggagcagcagcagcctacgccgtctcgtcgtcggcgtcgaagccgggctcgccggccgctgctggccctggcctgccgatccctgtcccggctcagggatcggcaggaccgatcctgcaacctggtggaggcttccgggcaccgaacgtcgctgcgggcgaggtctggaagtacggcgtgccgtgtgagtcctccgtctgaagaggacggtcaagaggtagcctcgtcggagccgccagggacgtcctgcgtgcttccggccgcgaatgccctcggctgacctccctcttcatctgctcgctcgacttagcggccaagagcgatcttctcttccgcaaggcgtaggtgtcgtctcgctcgaggctcttcggacctggatctccgtggagctgacccggccgcgatcgtctgtactcgccccgcagctacatcacccagtacgaccggcagaagcagcatcgtccgtcgacctgtagccagagtgttggtcagggccagctttgctgactccaaatatgtctgtcccaacagccgcctgggtgcgtcgtcctcgtgccctcctccgccgtgttgatcgcccgacctcacgctgaccacccgactgaccgcttctgccacacagacggccgagcacttgacgatcgccaacctcgcccgggcgcctcccctccccggcgcggacccggccaagggcggcagcgtctcgcgcgacaaatcgacgttcatggaggacgagcagacgccggcgctgttccgggcgaagctcaaggactacttccggtgaggacgagacggcggcggctgcgctctgcggtaccgtctagacttggtggactgacggatggcggatgtttgtttctgcaggagcggctacgatcgtacgtcagctcacgaaccatattttttgctgctgaagctaacttcgtctgatgggctttctcgcaggcggccacctcgtccccgccgccgacgctaaaatcagccaggtccgtcgttagctcgcgccagccgtttgacgattactgatgtgatactgaccctcttacaggaggcgatgaacgagacgttcttgctgtccaacatcgcgccgcaggtcggcgagggctttaaccgcaactgtttgtccctcccccttgcgcactggcggtccctgctaaacaagttgcctcccacttcagactgggcctacttcgaggactggacgcgcaagctcacgaaccaattcaccgacgtctacgtctttaccatcccactctacctcccggccaaggcggccgacggaaagtggcgtgtcgtgcgtcctgcaatgcgtgcgcccactccgactcgcggacgctgaacccccttcgactcgtgcagaactacgaggtcatcggcaacccgacgccctccatctcggtcccgacccactggtcgaaggttatcctcgccctccgtgcgccgcgcgggatggacccgctcaagacgaccgagcgcgaggtctcgctcgcgggctttgtcatgcccaacgctgtgattccggacaatgcaccgcttgagtccttcctcgtccctggtacgtcttgacaccctgtcacttccgagacctttctcgtcgtgaccagtctctcgctcctgccctccagtcgagcagatcgagaagttctccggcctcgaactcctcgccggcccggtcaagcaggccgcgctcgccctctgctcgcagacgacctgccagcccgtcattcgccggttcgacgacacgcgcaagaagctcgcacaggcgccgcccggccagctcataggcggcggccggccttagacatggtcatcctggttctcagcccggcacgtcttgcgaagcgtgaagcgacgggggcggccgccgatttcaacagaaagacacacacgcgagccacagatggcagtgcagaccatttctctcgcaccttctcggtacctttccttcgcttccgtttggctgagcgttcgcgggcccagctcctcgacacctcgcttcgcccttgacccatgcgcgactccctctagaattgctctcgccgtctctttgccctcgcctcgacacacgcgcggccttacgacttgcagtgcttttgcccttcgcggcccagccccggcctgtctcggttctcgtcccagacgacatgcgatacggaaagatgcgcccgtgaaccatccctcagacgtcgtgctcgttgacattgaggatcagcgtgccgaagagcctgacgttgttgacaaaggcggtcgcgcggagggcctcgttgacgctgtggatgcccgaggcgacgtacatgtcgtcggggctcaggtggttgtagcggtagatctgcttcgagagacgccatacgaacttagtgtcggtctaaggaaacaagggcgcgaggatcaggacgtcagcaaaagtctggcggttcgagcggacgctcatctgactcacgttgccgctcataatggccggggaggcaacaatctcagtcccctcgagcgcgtccgcctcggagttccggatgcgggtgcggtaagtctccttgaccgagccggcaaggacgttccagcctaaggtctcaggcgtcgtcggtgtgatgggcgccggctcgagcctgaagatgcggcggcgccaaaagtcagaatctggtggtcgacgtgcgtcgcaagagacgtcagactcacctgtgaccaaaggcctcctcgaggacgatctggccgtcgccagggcccttgatgatgtcttcgccgaacgccgagagcgtcaggttgagctccttagccttgaccgagacgaccttgatgatgcgctcctgcaattcggcggccgacgacgcgacgttgatgcggtggttgacgacggcagaggcgagctcgggcagagcctgacggtgcaaatcaggaagcgtattcagtaaagtcggtcggctcaaagcctcggcggagcctgcacgcacattgactttgacgccgcccgagatcaggtcgaccgcctgggtcgtgccgatgagcgccttgtaggcgcgcgtctcggaaagctcagcctcgagcttgtgaagcttcttgtcgcacttgatgctgcccttgatgagcccgtccagcttcgggccgacgtccccgtgcgtcgcggcgcagacgagcgtcgagtagaatgggttctcgcgggtcaggtgaggcttgtgcgggtttgcctcgaggtgagcgacgacgagggaaaggtagccgattgaagtatgctcgggcgggaccgacgagtgcccgccaagcgtcttgacgctgacgcggatgtcgttgtagcccttctcgccgacaccgagcgcggcgaccgtcgttccgtagaggctctggtagccgcctccctcgtcgagaatcagcgcaaaaccgtcgtgaccataagtcttctcaagataaggagcgatgtgagcagcgccctcgccgccagaaacctctgtcgacggcaaagagtggagcaacaaggtcagccaaaggcttgcgcagcaatagtcagaccggacgcaccctcgtcaaagccgaacgcaagtacgagcgtccgcttgggcgcaaagtcgctcccgaggatcgactcgacggccgacatgacgccgatcagaccagacttgtcgtcgacgcttccacggccccaaatgtactctccgtcgtctggcggtcggagagggcatcgggggacgtcagcaaggcgctagtgtcgaagacccaagtgctgagtctagacgcacagtggccagagaacggcgggtgctcccactggtcgtaggtcgtcttctcgaccgggacgacgtctgcgcgacgcgaggatcgacgaatgtcagcctaggaatctcgactggaaggccagttaggttcgagagaccacttgccctggtggcccatcaaaagcgtcggcaaaagcgacgggtccgagcccttccactcaaagacgaggccgtaggtgttgaccttggtcaggctgagcttagcgtgcgtccgcgggaaggccttctcgaggtacttgtggaacgcggcaaacttctcccagcgcgcatcgtcgccgacgtggcccataccatcgtacgactcggtctcgacctggacggcgccggacagccagtcgatcgcctggctcttgaaggcgccgctcttccagacggcgtcgagctcggcgtagaacggcgtcgagggcgtcaggacggcgggctgctggcaggcgctcttgacgagcgccgaaggctcgcctcggctgcttccgctgccgtgctggcgagggaggacagacgaaggcgccgtcgtcgacgagatgaggaagacgaagaggccgagggtcgcgagctggaggcccttgcggacgaggcttggcttgggcttggtctgctgggcaggcgcgactggcagcggtagctggtcgagaggagcgggaggaggggccttctcgttcatgatgggtgttggtgggatggagggtgtgctggggggaaacaggggagatgtggtcggagggagcgaaacgagcgacaggcactgagcccttccggccagcgtctcggccaacgccgaacgcatcccaagccccacgctgcaccctcttcgtgcccgccatcgggccagatacgaaccgagaatgacgaaggcagctctttgatatatgccccgtgacccttccagcgttcgcccatctcaataggcggctccgacgaccgtctcggccgccttaccgacctcgggctcctcctcgtagacgaggacaacctcgagcccttccatcgctctggcaaatgcctcgtcgtccatgtcctcagcctcgtcgtcggcgtcttctccctcgtcgctgacgttgccgggcgaggcgggccgagttggcaggacgtcgctgcccgcaaagagcgagatgagcgacggcggccccgacgaaatcttgacgtgcttcgagggcagcgcgtcgtcaacctcggccgccgtcggagggtcaaagagcgacttgagggcgggcttgcgtcggaccgaggtgcccttgtcgcgccgggtgccaagcgtccggaagtcgacgaggtccgacgtctcaccgcacgcaagggcggccgctgacggcttgaccgacaggaagcgcgtctcgtccgacagaaggacgccgccgtcgttagcgcccaggggagacgagacctcggtcggcttgccacggaatgcaaacggcgtcggagagcggacgtggccggctggaagcttgacctcgcgcacctcctcgagctggaaggctcggaggaggttcttgacgctgtttgaggggcgagtgatgccgtcagcgcaggcacgggcggcggtcgtcaacgggtgacgtacaggccagcttcgatgaggggcttctctttctggcccttctcctcgcgcgcgatgccgtcgtcgtcttgctgaccagcatcgtccgaggcggcggagcgagacgagccgatcggcggcgggacgacgattgaaggcgtcatgaaagagccttcgatcagatcgttgttcatctgcgcctcgaccgccgggaagcttttgtgcgggctcgacgtctgggcttgagcctctacgggcgcaggtcggagggggttatggtcagccttggcgaggacgatgcgaggggcggaggtgagggacggacggagggcagacgccacgtcccacgagtcgagggtcgcgccgcgaaccgtgccaatgacgatctacctccccccagccagcaagcaagccgcaacgatcagcgcccttcccttcctgctcagctcacggcgagagagcgcaacgcaccttgttgcgcgagccgtcgcccgaagagcgcttcggggcgtgcagcccgccgacgaggaccttgctgcgcagcgtcaggcccttgaagcgcagcgagccgagcttaccgccgctgagccggccggcggcgcggaactggtcgggcttgggcgcggctgtcgagcgagagggcgagcagagcgagcgtcagggtgtctgagcgtaaagggggcggttcgtgcgtctgcgcgaggggaggggggggagagcagacggacaaagcgcgtgccgcaaagcgattgaatcgacgacggcatggtggatcgtcctcgggacgtctgacctgcagaagagccgcctggcgcccgaggtgtcgaggccaacataagttgacgtcagggcgagcgtcgagtcgcagagcgagcactgggcagggccgggagagaagccgagttaaagggaaggtcagcccgagcggcggcctggcgttggctgctggcgagtgccggctaggagcgacggaccttcaagcacccggcgcacacccagacgtcggagacggcaatcttttcctttggatagacgggctacggacgggagagcggtcggtcagagaggtgcgtcgagcgaggtaggtcaaagggaggccggcgacaacgacgacgaggtcgaagacgaaggcggcacggcgggacgaggaggcggacttttgagcaggtgctgcacggccgggacgacatggcgagcttggttgggaggcgagcgagagagaggcaagaagagagggtgctgatgctggtcgttgataggcctgcagcaagaggccgcctcccgctgggaggccgagagaggagggaggctcgagcgacgaggaggcgggtcaaaggggctggctcccctgtcggcaggtcgctcaggggcgacgtcagtcacgctgccgggagtcttgagacatggcggtccgagcgtcgacggaaaggcatgaagggcttgagtggctggaggacagggcgagtgtcgggctgaaggcgagcgacagggcgaaatggtcgtggtcgaggtcgaggcgagggtcgtcggcagctgcgcgcgacggcgtctcggtccgacaggcagcacggtccttctttcgctcattctgccagtgcaggtccgctgctgacgtcgagcactcaggctcgacgacgttcaggacgaccatggcatcgagacgacaaaacggacgcggtcgacaaccacccgcgctagatgcggctctgcgcgcgcgcgcccgctcgtccgccttctctcgaccaacccgccagcttgcggccggttcgccgagctcagatcgagcatcggcagtcccgcaagtcgactgcgaaggtcgtccgtcgcccgtcctcctggcccccgagcgagtggacgccggctgacgggtccgcaggcgcacagacgctgctagccggctcggaggcgaggatggcgacgtcgaaatgggcgacttgatggacggcgccgacgacaggctgccagtctgcccgaggcccacctcacacaatcaggatcggcagcctagacgaggcgaaccatctcgcctgccggcggcggcggtggggccgtctcgtctgcagcagaagcagcagcacccgcaccggcggcctgagcggcggaccggatctcgcgccgctcagagagcgtcgggtagcgctcgccgggcttgtagaactcgtcgacgggcatgtttgtgtcgggcgctggcaagggttgtcaagcacgttgcaagagtcgagcggccggggatgacgggcgaggaggtgagcgagcttaaagcgtcagcaacctgcgggctcgacgtgcgggatggcttggcgtaacgcactgagtgggctcgacgtcctgttccggccggtctcacccgcctcgacctgcctgccgacgacagcgacaaacgtcgcgaacgaggcggcgctgatggcggccaggagccagatcgaagggcccttgcgcgcctgggcctttggcggccgagctccggcgagctgaccttgaggcgacgccgaccggcgaacgatggacgcgagcatgacgacggtggaggagggtgagggcctggctgggcgaaggggtgcggtgctgacggtagggcgctgtcagacgatgtcgaggatgaccgtcaggaaggagcgaaggcacgacgcacgcagcacgacgacgagcccgcccaacaccgaccgcctcggccttccatcgcacgacctccagccatgtcagatccgcatacggcctcgcatctcgcactgctcgcccggctcgagctcctccacgcgagctccctcctccggcacgcgccgtcgtccccgcatgccaacgacgagaaggaggcgatcggccaggagggcagcttcctcgtcccagacgacgagaaggagagcgtcgtcgaaggctgggaggaaatccgtgaccttggacgcctcatgggcgacggtctgcgtgaaggtccgtgtgtttgcgcccgaagttgttccatccgggccgctgtcgctgacccagctcgcctcgccttcgtgggtccggccgacagctgcccttcgcctgccgctcgcgcactcctcccttccgtcgacccttgccgacttgctgaggctcacgctctctctaccgtcgccattgatctcgcccgcatcatttgcctctggtccggcctcgctcggtgcgattcggcccgagggtctcatggccgaggcggcggtcgagatcctgcgggcggccggaaacagctcgtacgactgcggtcagtgccgattgcgctgtcgaaaggtgtgccggaaggatggcgagctgacagagcggtcagcctgagtagatgacgcacgggcgagcctcctcgcggccagctttccgcagctcgtcctcgtcctgcttcactcgctgctccctgccgcccacgacgccgaggaggccaggccgagcctgcgcgaagccaacggcgcgttccggcttgtcaagactgcgttcggggcgctcatgaacgttgcgatggaccagggtgcgtgccgcgccgcctttcacgtctctggcgtacgctcgttcgctcgcttatacccgcgctcgggctttgcctctcgcagaggacataaagaaggccctcctggagatggacggcgcgctcgcgatcctactccggatggccagcgccatctacgagccgacgccctgggccgccgccgccgccgccgagggggaggaggaggccgacgacgagcggtgggcgacgcgcgaggaacgggcaaccgtcggcggctgggcctggaaggtctttggcgacgttgccgcgctcggtccgtcccctcacccctgaaatcgtccgagagcagcccatgattgtcactgacgccgcccttctcagagagcgcgcccgccgccattgagttgctcgctccgacgcttctgcccctcttgctccctcccgtgctagcctacaccccgccctcaccctcgccacactccgccaaaccctacccagcctccctgctcacaaccgacctcagcattctcacgctcgccgttcaaacgcttgagtctcagacgctcgacacggccggctggcaggctgcgctttttgagcgccgcgccgactttggccggctgcttgactttgttgagcgcggggggacgcctctcgtgctctccgatgtggaggacgaggacgatgaagaagacgtttcgcccgaggtcgtcgcgaagcgcttcggcagcctcaagggcggcattgtaaagtgcgtcgtcgccgtctttggcgaggacgctgttggcgagcgcgtcttcgaggccgacgagagcggcgagctccggcggatgtgcgggtggctgcgcgacacggaacgcaaggacgagcgcgaggacatgaccatctgtgctgtcctctcgatcggtaacctcgcgcggtcaggtgcgtcttcccctgttgcatttgccgactactgtccgctggctgaccccccccccccctttcccgcgcgctcgcgcttgacccgtacccagaggcccactgcgtcgccctcctccagccaccgctctcgctcctttcgtccctcacgccgctcctcgtcccttcgaccgacatcaaaatccagcacgccctcctcggccttctcaagaacctctcggtccccgacgccaacaaggcgttgctggctgcgagcggcgtaatggagggcgtcacgtttggccttggtagtcttggggagaagcgcgatatggtcgggagcgttcagggcggcgcgattggggtcgtcaagaacctctgtaagggctcgcgtgcgtcaaggtcgtccggtccgtgcattcccgttgcccgtctgctgactctcggctcttccacaacaatcagcggccgatgctgccaagctcgtcctgcctttggcagaccacgccaaccagaccctcctccctctcgtgctcgcccttcaccgccggtcaaacgactttgccatgcgcgcagaggctgcccgcgtcctcgtcaatgcgatccggacgctcttcgcctccaagaagaccgacccggcgccgtcggacgacgtcgtcgaggcaaaggctgtgctgagatcgagcgagggggtcgttggcacattggtggacctcgtcaggggcggggtgaacggcgggtacaacgtccttgtcgcagaaggggtccttgccctggcaatcctcgctagcgccgacgccgagaccggtgagtgacctgcacggcctgctctcgcggcggacctcccttctttggctgaccgtagtccctccgttcgaactaggcgggcgcgttgcgtcagcactcaccgcgctccccgcagccaagcctgcggcatcggccgacccggcctcgcccgaacctcgcctccagtcggcgctcgagctcctcgcttcgctcctcacccccacaccccagagcccaaagaacgtcacactctcgtctgaggtcaagcgcaacatctgcgctctcctgaccgccgccggccgaggggtgagcgcacccgacgagaagagggccttccgcgccgtgctggagcgctggtcggtcgacgaggttgacaagggcgcggaggggctcgaggagatgcgcgcgctcggcttgcgggtgctcgaataaggtatgtcggtcaccgcaaaaaggagctcgcgaaagaaggccgcgaggaagacgacattgcagaagtgacagtcgagttggccgccagctcaatgcccgaacggccgcgattgcggcggagcctgctgctgcgggtgctgccgcgtcgggtcaaagaagtgtggatgcgaggaagaggccgtctgcgttgccggcgattgtgaggttgagaagtcgaattctggcggaggcacccagccgactctcggtgccagtggcgcttgtggcgaaggatcgtacgcgaggccgggcggcaaagacgacagaaagtcgagggcgctcgacatcgaccacagcccttgctggacaggcagcggtgggccgtgcaaagggacctgctggacatgagctgcgtaggacgggccagtatccggcatcatatggttcggaggccggccaacgtcggacgggctgtaggatgccgccccgggagtcgaccagaagctcacgtcggccggcgacatcgcggtcgagaagggcgtcgtaaaggccgccaagtcgcttccgctcgtcccaccagcctcgtgttgcgccatggcaaagtcaaccggcgaggcggacgcttcttcgacgaccgtcgtctgggctgccggcgtcgggggcggcggcggcggtggcgcgtgttgagatgaaggagccggatcggagcctgatggtgccgccgatcccgaagctgctgttgccgctggcgatggaccggtgttggatgttgtgcgagccgtcgcagaagacgacgaggaagcggctggcgcagccttctttgacggccgagacgggttcggactgagcgcagccagacgttcggcctcgagccgcttcttgttagcgcaaaagctgtcgatggccgcctcgtgctcgccccggttgatgatggcttcgtagagctcggtcgtcatgcccattcggggcaggacgcttggcaggcctgtcgaagtggagggaggaagtggagggcgttcgagaagtctggtcagcctcaagccgacaatgtaggctagggagcaaggagggaaagggcgaaccttcggtcaggaaaccagagagcgtctggcagagcttccggagctggcggttctctgcaatgacagctcctatgatcgagctgatgaaggccaagagtggaggcaggagaccgccgtcaatctcgtgcgcacgacctgatgcagcagacgctggccgccccgagtaagcgagatgacggctacgcacccaagatgcttgatgcgctctggctcgggtcgcgagagaagctcgagccgggtttcgagctcgatgatgtactgctggcgcttgaagcgagcctgctgctgggcgagccggttgacctcgcgcttcgaccgagcggcctcggaccggacagacttgtcaaactcgctcatcttgcgcttgcccgtcgtgcgggtcgagccatcggctgctgccttgtcggaccgggctcgcttcgaagtcgcggcgccgggctgaacagaggcgatgagcttgtatcagctcactcacccgagcgacggcgcgaagaggcagcgtaggaggcttgcccggcgacatgacgcaccgagggtccgggcgactggctgccgtcgctgccgtcaaacgatccgtgatccgacatgctgtcctgcgaggcttttgtatgccgtgcgattgaagaggcgaggaggagttgaaggggggaaggtgggagtcggcagatgagtggcgctgacctgacggagttctcgagtcaaaaggggacgacatcggccaagcttccctcgttcctgtcggaccgtgctcggtgttgccgacgtcggaccacgtccctggtctgaaccactttcggccggcccgacaaggcgggcgtgacccaccgatgaacgtcggtcggcagggctcgagccagaggggcagcttcgtcgacgacctgctgcgcgctgccgctctcatctctcgctctgctcgtcgctctccttactcagatgaagcgccggtatcgtgcccggctggcagctactgtggccgctttgtaggagagagaagccgcatctgatcgtaccgaggcgtctgcgtaagccggccgagtcgggcgttcgccatcgcccagccgccgaagccaacgtcggcgcccctgcgcctctgcttccgctctcgtcaggatcgaagaaacctattactgtctcctgaagcggagcacctcgccatcccgcacgaactgcagccagtcttgctgggtcggatagatgagcatgaggggccggatggtttgtggggacgcggccggccaagcagagcacggacacagccgagcatgaggaccgcgccgtcaaggaacgttgctccgggcgacgtccgtgacgagcaggcttccgagctcgcgtgcgtcgccggcgctcatgctgcgagagcgacaggcgtcagccaaaggcgagttggaggtctcgcttgaagaactggagcgcgcaccctcgagatagtcggccgccatcagcacctcgagcgcaatctcgggctcgatccgctcggcaaagtcgggcacatagtccttggcggtcgcgtccttgtactggaccttgaagacaaggtactcgagcaccttggcaacgatgatgccccggtgcgggacctcgcagctgttggacgacgactctatgaactgggctggaagcggagtgtggacgggtcgtaaagaaggtcaacaagatgacctgcaggaccagcacctctcccgtcgcgtatgtcggtcggtggacaggtcgcgacagcgtcggttgacggctcgccaccgagctcctgacgctgcagctcccgagccacctttcgcccgaccaaccaaccaacgcgtccacagatctgcagacgtaccttccgggtccagactacgctcgagcatgccgctcgcggtcgcgacctcgcgcttgacgataaaggtgaagccatcggccgagaggatgcggacccactcactcggcgggggagcctgcgagccagccgggcgagacaaagcaggctcagccggtgctccacggctcgactccgacatgagactgagacgcactgcgtcatcggacattctcgagtgtgcgcaagaacgggcagcgaggtcgacgaatcaaggaaagggggactgggatggcgtcgaggaggagcgaccgtcggaaagctcgccggccgcctgctgagacgagggccgcgcagcagacgaggcaacctttcgacggcgcctccattcctaagtcctaagcgcaaagctaagaaaagcaggagagggcaggagagtggagagcagcgctctcatgccttgaccaactacctgaggagtctatggagtgaaaggggaagcagagggcggccagtccttcgtacaccacctgacgcgccttctcttgagctagctcgagacgcgcgcgaccgtgctctgacccctccgacctcaaccaggtcgaccggcgcctcacttccagctcgatgttcgagccattctcgcgcgggtcggaggatgttcaccggccgctccttcgtacgtgtcagcgggtcgccgacagagagcctcccgagcagctcgaacgccgcgccgcgtccggaagggctgaacgaccccggaagctgacaggcggtctctctccttctattcgggtcgtggtcgcatgctggtctgggcagatggtcagcaagagacgtacactccgcgcgcaggccgcttcgttagttgcctgtcgctctccactcccttcaggtcttgccggctgaccgacggacgtcgctccttccgaacctcctttctctccgagcttacagaaggcgcacatcacccactcgccgtcgttcccatcttcgctcggacacgcctcaaccccagctcggatcgcaggccttcctgtgcagcctcagcgccggcctcatgccgaggacatcgccgacgatgacacggccgtcggcaagacatgggagggactggtgcggccgagccgacgccgggtcgagggatggttgggcgtctggtggaagcgctggggcattctcgttgtcctcccctgtgtcatagtgattagtcggaaggatattgccggcctgatcaacacaacggctgatccgcttcgctcacccttctcgcaggtctgggtctgggtcgccatccccttccccgtcgccgacccgtatcagccagatgcgccctggcacatcccgtcgcccttcccctcacgacggaacggcaccgacgtcccggccgactcagacgacctcccactcgacctcaacttctacttctatctcgtcgtctattacggcctctatctgcacgtcgccctcctgtttgtcaccaagatctttgacctctatcggctcaactggtggccctcacggatcggcggccggctttcgtacgccttcttctggtgctcggccctcgttatcggctgggccgcgcacgaggtcgacctcgtagagcggctccggcgctggactggccgcgagcgtagcaactacgactgggagcgcaagagcttctggacgacgctcaccttctgcaccatgggtctgccgtgcgtgctttatcttcctgccagacctttcccagctgattcgtcgctcgtcggttgccagcgccctcgtctgcttctcggtcctgaagcgcgacaagcgccatcaataccgccaccccctgacgtcaacccaggtgcgaccctcaccttcctgcttcctcccctcgtggcgcgccgactgatatcccgtttggcaggcgacgtttctcgagcgccagctctcgaaacggatcccggcttcctacctccgcttcctttggttcgtcaccgtcatcggcatcgccatgtcggccctcgtcgctgggcaaggtgaaaactgctcgaattacctgcactggatcctttaggctcgtgactgactgccttggctctcggctaggttactcgagcgtcttcctcagcacactgccgcatagcagcgtcgacgctgcagtgtgggtctggagctgggtcgcaacgacaaacgtgcgtcaggcactcggcttgcggtgtgattcatggcttgaggctgacctttccgtcgctccactacaggtgcttggcctcgtctccgctgccattattgagagcaaggtccgcagcaagggcctgctgttcttcttccgctactttttctcgctcgcctactttgtctttgtacatacgccgccttagattcagtggctcagagctgactttttagtccttcgcagtaccggaacctcttcgcacggctcaaagatccctcagactgtgcgactcctcgttcccctgcttcggccccagccatttctgacctcatcggcctggcagtcatcctcatccaatcgctctcgaccgtggccgtcatcgtcctctatccgctgcagatgatggagatctaccaccgcctgctcgtctggacagggcgctactccaagagcctcgtcgatcaccgcgaatcggtcgcgatgggttagtgtcttcgaatcatcgacgccctctgcatcatgctgacgtgtgatggggcgcaggtttctacgcacgctcgctcgcacaggccgtctcgatgctctccttcctcggctggctcgccatcctccacttcggacccaattcagcagtatacccgttcttcgccttcgagacgaccgagggcgacccttacacctttgccctgacattctgggcctcttcgatcgtctgggtccgtggccgtcgctcctcgctcgcaagcagacgaggtcctcaggctgaccccctcccacacgtatgacgaaggcctccgagctcgcgagcatgattggcgtcatctggatcgtcaagcttgccttccggatggacctcaacggcgtcgggctcgatgtcatgcgggcgcatgtcgatctcgtaccggcgtgctgtcagtcgactcttcggacgcgctgcagccgccggcatgcgctgaactcttgttccttgaattttcgacccgcaggcgtcgcctcgctgtatcagttgatgacgatccttctctttctgctcaaggtcgggctcgcgcggtcttctcactgaagcagacatcggccgctgacgccgcgctctcctcgactccagctcaactttcgatgaccgcaccgaccacggccggcgctttgccggcacactttcggaccttactttatgaccctcgccttcgcacgactcttgatgacctgttaattttgctcagtcttgaccgggtgcaatcgtcatctatgggcggaaacagcagcgtgcgaacaagtgcgaagatgcgagcaaggggcggtacaacaagaaaagaagggcaaggtggagtgggcaggtctacaacgcggatctaggagatggtgataagggcggccagcgtcgcccacccgaggacaaccgcaaccgcccctgcctgcccgccagcaagtctcgcaccagactcgccgtcgggccgcgctcggaccggggccgtgtagttgtacccagcgtcgatgcagccggcgttgtcgccctcggtaaagatagggaagacgaggagggaggcgttggagaggtctgaggggacgtagccgtttcgaatgccgttccggagatcccactacgattgattgacggtggcgcgcatcagtcgccgagcgtaggaatcctcagcagagggtaagagctcaccgtgtctatcgcgtactcagtcttccaggtccagaagtaccagccctttgagctctggtcggctgccgtcggcgagtaggccgccagctgagcctcgaacagcagacggagccacgtccgcttctcgcgcgtcaggcgccagtcctgagcgggccgcgtcgtgcccggcggtgtgcctgagatcgaaagagacaggggcacgttaaagccaggctacgtcgaagaggtcaggaaggcggcgcacccgtctcgagggaccactcgccaacaactgtacctgccccaccagatggcgccgacttgagcaggcgcgagttgttgcagatcgagtctgcgaacgcacagaagggaagtcagtctcgtcgtgtaagggacctgctccaggccctcgagggactcaccaatgatctggtcgcggggcaggttctgacgcggtgcaaaggcataatacgagtgctggtcgatctgaagccagtcgggactgcggcctcggccgctgccgttgttgtcgtcgccggtcgggtcgtagcctctgcataggggcgagaagcggggtcagggaatccgagcctgggttcgccggacgacgcacgactcaccgccagtattcgggcccccagaaggcgtcgtggatagtgacggtcatgccggcggcagcggcggttgagcggatgacggccgaggcctgtgcgtacgaatccttgaggtaggccatcgtgaacgacaggctgccgttattaaaaagcctcggttcgttcatgatctcgatcgcctggacgacgccgccgtactctggcttggtgaactcctctgtaaaattgcggaggacgccgagcgcccggttgaggttcgtcccgttcgtcgcaaagaggggcgtaccgacccggccagagtggtcgtcgccgttctggctgccggggaggccatggaggtcgaccatgacggccaagccgagctctcgtgcccagttgaccgcacggattaggaaggggtacgagccggcgacgaagggttcggtcgggaggacgtcaaccgcccagtagccgacggggatccgaacgtgcgtcagcccggctttcttaatgtcgacgaggtcatcgcgcgtgataaacgtgctgttccgttgcggagtgagcgtgccgtcagcacggtcatctacatcaagaggagcccagcacacgcacgaccagtgatccgagaggagggcgagtgtccgatccctgccgagcgctgctccgagcgtccactcgtcgatcgccgactcgccgcccgaggagaacagactcggagtgatcctgatgggagttgggcaaagagatcagtttcattcgaggttgagtcggacggaggggcagcggcggtgagtgcaggtggagggagattcggaggcggcggtggcgacgacggcggccgtcggcgacggccgacaccctcttcagcccccctcgagcccctacgagctctctcgggcagcaagactacagccagtccacaaaggagtaaagaggacccaccatgcctcgctaatgagccacccaccgaggttgacgcctcgaatgacagggaccgcgctggcctggcgcgtacgaagctgcgcggccgccggtgacgcagaggcggagctggcgagggcgaggagagatgccgcccaggccacggagaagcgcatacactggtgagctcaaagtcagcctgctatccgagggggaagctctcgatatggaccgacgcacaagagggaagaggaaggtgagtggcgtgtcggaggtgacgaggtgagccgtcgtcgccaagagcgcggcgcgtcggagcgatgcatttgggcaggctcaccgctgcatcacgccggccgggacctcgatctgctgaagctcgctcgcttgcagcgaccgcgcctcgcttgtccggtcggccgcccggtcaacacgacgacccctcgcccgcaagagatggctaacgactaccaccctgcactcacaccatgatcctcgagaagaacgaaaaggtcgccgccgccgacccaccggcctatgaggacgcttcgcctccgccgtcgcagccagcagcagccatcgctgagcagacagacctggcgaccggcctgcctccgtcgacagaggacgagccgccgcaagcaacgcaggccgacgctgacggtccatcgccctccctgctgagtccgctcgagcacgacgttaaacgcgccttctcagcaggcccatacgccgcaagtagcagcagcgatgggccgcagcagctcgcagcgacgcagcggccggtcctcctcccgccgctctacccgccctcgacctcgtcacctttcctcctcgcctacccgccctcactcgagcccatcgtcggccggacgcccttcctctccttccttagggctctgaacgacgcgctcgctccgtcagcactcgagagcgctgaccgcgcagcgagggctatgccgcttctcctcggcttgacatacggcgtcacgaaggccatcacgggcgccttgacgctcggcgtcgctcaggcgacagccagcctaatcgagggccccgacagccaaacggcggcgaagattggcaaggtgtggctccctcaaggctgcgttatgcttgtcggacgagacgctgaccacctcctcgatcaacgtctgtcaggcccacgcattcatgtacggccggacgtcgctcccatcacgtgcacggcgcctgctcgagtcggtcaacctcccaactggtctcttcccgccttcgtcaaacctcgagctcctgctcgtgccctacacagccctggagcgcatccaacggtcgacggccggcccgccgctgcccgacgtccccgccgacgctcagcgggcgctcacgagggcggcagcaaaggccaatctgaaaacggccgagcggcaggttgaccgggcctggcgggcggtcgactaccggcgctgggcgtggcttgaggtcgacctcgtcaacaacgccgccgactcgtcagcggccagcgacgactcgccgacatcgccctcggcagcgacctcgggcgtcagcagcagccagcagacgacctcgctcctctcgcacttcaaccacagcctaggcgcacacgatccccgccgctcgggcatcacgctcgccaacgcccagaagcgggggatcatgcggcccgtcgccggcgccctctcgggcatcccgacggcggcgggcgagcaggatcaggcagcggtagcggaggcaagtgggtttgcgtggcaggggagtgggcgggccgaggatgcgctgtttgtcgtcgtctgcccgcgggggatcgacctcggccatgcctgagtgtctacgtgcttgcgcgcgacgtttcttttcttcccttccacgcctggcgcttcctgtcgtctttgttctccatcttaatgaccttgttttcatgcgacgaatggaaggtcagaggcaggagtcgggcgaagtatccaagagagagtgaaatgaagggcgaaagaagaaggggtcgagacggatagaggagatcagagcagagcgccgccggccatcactcgcgcaggcctgacggcaggcgagcgccgccctttccagcggcggcatgacgctcgctccggcggactgtccggtcgaggacgaacgggctcatcgggtcgagtgccgggagcgaaggggcgggcgtttgggcctctttggcggagaggccggcaatgcggctggtgtggttgccgttgcgggctggcgcgggggtctgcaattgggcagagcgagagagtcagccgagagctggcgaggactgccgggatctgagtagcgcacctgagacgcaaagagcgtgtcggcaattctgatcccggccggcggaccgccgttggtcggtgcgagaccgaaggcagacgtcgcttcgacagcggccgaagcggccatcgacttgtggacctcgagctcacggactcgggcagccaggacaaggttcctgtgcagacgagagcggaccgtcagccgcctggaccgagatgggaaacttggagcagaggcaggatgcaccgctcgagcgcctcgcccaaaagggcctgcatgcgcgcctccttctccttggcctcgcgacggcccttgtcgagcagacgggaaagctcgcgctccttttcggcgctggccgtagaagccgtgctcgcgccgtcggacgacttgtgtgcgcgtcttggctcggagttgaggggcggcgagatgagggctacgatgatgatgccaacgtcagcgccaatgtgtcgcggtcgggcgctcgtggccagtgatggacttacgtggaggctcgacgcgtatggtcgaatcggcaaatgacttctcgagctcagcgattcgcgcgagcagggcgtccattatgccggccgagccctcgacatgggtcgagctcgcgtcggccgcagactgaagttcgcgctgctggagccgatcggtcaggcgctcgactggagtgcggggagagcggcaagtcagcttcatcctcgtcgtcgacgcagctaagaccgatttgcagcgcactcaccgtcggcctgccgctgaacgtcacgctcgagcaacatccggacctgcgcctcgagctgctcctccctctgagcgcgcgtcgcctcctcctgcagccggcgcttcttgtcggtcaagagatcttggactggttgaaacaaaatggggagtgagcgcgtgcgagaataaagtcagtctttgcccggcggcgagagaaataggtggcaagcgactgactgatgaggctttgccactcaacggtgctcttgacggcgacctggtcagccttctgcgcgtccttctccttgactgcgaaagagacgtcacgagtcagcgtcgacagtcagagggcagactggggcaggaggaccgtacgctgcgccttgaggtgctcgtagagctcgacaagctcgtccagtcgcgaccgcgaggcctttgcgtcgttacagacaccgtcgactataccacgccgagcagaaaggtcagcaagtcgtcgctgttgagagtgaggagacggacgaacgagccacagcgagctcgcggatccaggccttggaggcggcgttttcctcgcagaggccgagaatgtccttcgcgaggccaatctgccagcagccgaccgatcgagggtccgtatcagcactcgcgctctctcacatgaaagcgtagaccgatgagggcgcacgcagtcggtcttgtagttacggacgcggatctcgaggttctcgatccgcgcggcgctgtcgacgtgctcgccccggaggctgcccgtgctcaggcgcttcatgtgcccgccagcactggccccggccccagcgccgacgctgacaccgcggtggacgatatcctttgcggtcgctggcgtcgggccggtgagcgagaggcggggcttgcgcgggacactggaagacgacgacgaggcggggtgggtcggcagcctctcgaacggcaggcctcctcctcctcctttcgctgccggctttgaaaagacgagaaacgggttagcgttctcgtcggccagcgagccggcggatgacgagcggcctcgggaggcggcttgagcttgggcttgggcttggacgttgctcgggtggaggggcagaggggcgggcgaggcggtgagggaagaggtcgtctcgcggatcgacgagcgcgaggctggccgggaaggagctagcgaagtcatgggtcacagagctgagagggagaagcagcagtggagtgtcagctcttgccaagggggagggtagcatcaggagggacgtgcagtggcttgctcttgggcagggctcaagactggacgagggacaggcgagtgatagtcggcaacagcgaactgctctcgctcggcgccttccccccgccgcccacccctctgcaaaagcgggcgcagctccccgtcgcgtcgcgtgggtcaacaggggatcgaagttgggtgagacgagtagacgaggcgagtgaaggcagcggctgcgcggcggttcccctcccccgcccctggtcactcttcctggtcgacgaccgagcgggacataccatgacggtgcagagcctgtcatcacctgttcgccagatgtctgtcagctaggtcgagtgagcggaaagttgacgacgcgaggagcagagagacaggggtcaggatgcgcagggaggaccgacgctcctgtcgccagcccaccgtctgtaggtgcggtgctggcctcagcaacgacagccggcaacagtgccctgctcgaaccagtcttgacagcgcgcctctttgctcgtcgtcggtctcggagagaggacgaggtctcgaccccttgaccgcgctgcctggcccgtgcttgtgcagcagagcccgttgccaaggcgaccgggctcgtgagctggcaggggcggcctgtctcttgcgcgaggcgggccatctcgctccttcttcgcctcctcctgaacacccatcccctcccggcgaccctcttctggcaagccctctacctctttttccccgtacgttcttgtctgcagtcctccttgcttgctcggaaggccatgctgcaagcggtccggtccgtcgggctcgaggtggcctcggccggctccgctggcagcgcctccttcctccgaacttcttttgctgaccatttggcacgccaccctttccttccagttcccaagatgcgtctttccgtcgcgctctcgggcgccctcagcctggccaccctcgcccttgcctcgagcgacgtcgtcgacctgacggccaagtcgttcgacaaggaagtcaccaacgacagcggcctcaccctcgtcgagttctttgccccctggtggtgcgtccgacccggaccgtgacgagtctctttgcacgctcgctgacagtctcaatccgctccttcacagtggccactgcaaggcgtgcgtctgttctcggctcgaggctgtggcccagtgaacgcgcgccaccttgcgacccgggctgacaaagttcggctccccgccatctcttctccctgcagcctcgcccctcactacgaggaggccgccaccgctctcaaggggaagaacatcaagattgccaaggtcgactgcactgtcgaggccgacctctgccaggagcacggtatctcgggctacccgtgcgtgtcgccgcgttgtccctccgctcctcgagtcagtcgatcgacaagctgaccgagctacattccaccctcacagcacgctcaaggtcttcaacgccggcgccgtctccgactacaccggcccgcgcaaggccgacggcatcatctcgtacatgaccaagcagagcttgcctgccgtcaccgagatcaccgacgccgagcacgagtcattcaagacggccgacaagatgtgcgtctgcccagagacacctccttacccttctccgctgacccgaccccgctcctccctctagcgtcgtcgtctcgtacacgacctctggtaaggccccggaggccttcaccaagtttgcctcgtcggcccgcgactcgtacctcttcggccacacggcctccaagtcggtcctctcggccgagtcgatcacggccgaccagattgtcctttacaagtcgtttgacgagcctttcctctcgcttccgggcgacctctacaagggcctgacggccgagaagctcggcctctgggttaaggagaacgctgtcccgacgctcggcgagatctcccccgagaacttcggcacctatgcccaggccggcaagccaatcgcctacgtctttgtcgacccgaacgagtcgaacgaggccctcctcaagtcgctcgagccgctcgccaagacgcacaagtctgagctctcgtgggtctttatcgacggcatcaagttcgtcgaccacgccaagtcgctcaacgtcgacgtcgcctcatggccgcgcttcgtcgtccaggacctgacgctccaggccaagtacccgctcaagacggccgtcaacgccgccaacgtcaagtcgtttgttgaggagtacctcgccggcgacgtcgcgcccgacgtcaagtcggccaaggtcaaggaggtccaggacgagtcggtctgggacctcgcaaccgacgagtacgagcaggtcgtttgggaggacggcaaggacaaggacgtctttgtcgagttttttgccccctggtgcggccactgcaagaagctcaagccgatctgggacacgctcggcgacaaatacgccgacgtcgactcggtcctgattgccaagtttgacgcgaccgagaacgacgtcccgccgtttgagccgttcaagatccagggcttcccgacgcttaagttccggccggccggctcggacgagtgggtcgactactctggcgaccgctcgctggagagcctcgtcgagttcctcgaggagaacgccgcgtccgacctgacggttaagaatgtgacgaagcgcgcgaccgaggccgccgccgcggccgacgttgttatcgagaagggcgccgaggccaaggacacgatcgtcgacaaggccggcgaggcatacgacgctgccgtcgagaagggcgaggaggtcgtcgaggctgtcaagagcaccggcgagcaggtcgttcgcaaggtccgcgaggagctttaaatcgggttgtagatttgccggacagcgtccacggaggcgagcagagagttcgaccactttatcacacgatctccttcgattcgccttctccaggtcgccgtgctcagtccatcagctcatcatgcatacttgcgcacgaggccgtcgacgtgagctttcgcccccgcctcccactcctgcgccttgatgctaagcaaggccaaatccggccgacgacgtggcccttgagtccgagcgggtcgttcgccctgccgacgtaggagccctgctggtcggctctcagggccctgaccgcccgaagcgagttcgaggcctcgccaacggagccgaggcggagcgcggcagtctttgacaggccattggtgtcattaattgcggatgcgggatacgtcgtcagtcagtgcgagccggatcagacaggtaatctgagcttcacctcgccactatacacggtggacgccccagccgccgccagccaccagctggaacgcatggtcgagcatgactagcctgtcttcgcccctcaggacgtcgatggtaggctcgctgaagcagaagttgaggtcgtacgcctcgaccagcgtcgacagatggatgtcgaccgggaaggcaggcggcggcggtggtcggaaggcgttcttgttgcagggcatgctcgaactcattccaagggtgagcgtccgaggtggtcgcacgctgctcgaggctgtcaagacggagatggtcagcagttgacgggctcggctcggtcctgcggctcgttgtgcctcgtgctgctggccgcggtcgccggcgtcttgtgtgctgctgcgcgtcttcgggcggcagaagtcgtcggcttgctgcagagggcctctttccctcactcgtcttgaagctgaagtttgcagggaattaggcagatacgatatcaacactcagccgagagctacccgatcggctgcagggtcgatggttgggcgaggtaaggtcgaccggcgcgacgaccagcgcttcgccgccgcacgcggcttgccccgttcgcggctcgccgaaaaaggatcgcctgactccctttcgatccacctttcagctttctgccgaccaccactctctcacctactctccttgtcgctgcagaaacgcaagatgatccgcactgcaagcaacgacgtcgaggctgccgctccgcccgcgagcccgaccgccgacaatctcaagctcgacaaggaggcggagctcgacgccgacgacagcgacgtcgacagcctcgatacctgggcgcctgagaagcaggcggcctactgggagagtgcgtagcgacggccgctcgctgttttaatcgatctaagcaccgggctgatagctccttcctctgtcagacaaatggggcgtcatcggccgcttcatggcgttcgcgaccgtccggggctgcgaggcccggggcatccaaccgacgtcgctcgaggttcgtccgccagacgacacgttgcatctgtctgcctgtggctgactgaaatcttgcacatatcatcaggagcgagtacgagtcacctggcgctcgtacatggacctctcggtcctctggttgtcgatgaattgcaacatcctcatcttctcgggtgcgttcgcctttgcctgccctgaacgactagtgtgcgcaccgactgatcaacgccccgtcttccgcagccggtattctcggccctgagctctttggcctgacattcaaggcgagcgtcgccaccatcgtctgcttcaacctcttctcgtgcctgccggtcgcctacttgtgagtatcttgcgtcggccgcctcgaagcgactacttctgctgatcaaaatgcttgcttgcacgcagcgccacgttcggtccgaagcttggcatgcgccagatggtcctgtcgcgctacacgttcgggtgcgtcaaaccgacgtcgctgggccccgggctcgctcactgacctgatgaccgctctcgcgcagcttcttccctgtcatcgcacccgcattctgcaacgccgccacggcgctcggcttcacgtcgctgaacgcgattcttgccggccagacgcttagtctgtcgtccatgggcagcctcagctggagcgtcggcatcgtcctcgtcgccctgatcggcctgctcgtgagtactcagcgccggacgttaacctttttagctacccaaccttcctagctacctgtctgacccatactgtgcttctccccgcagccatccttcctcggcctccgcgcgatgcactacttttcgctcacgctcctgccgatctcgatcgtcgtcttcatttccatcgccgccattgccggcccgtcgctcgcctcgatccctgccggcgaggtcgcgctcggcctgcacaatacggccggcggcgtcctcggctttggttcgacctgtatcggctttgtcgcaacttgggccgccttctcgagtgactacacgtcatacatgccgccgacggcgagctcccaagccgtcttctggaacgtttacttcggcctcatgtgcccgactgtcctcttccagattatgggcgccgctttccagtgtgcggccggcgccttacccgtctgggaggagggccaggctgccaacggtgtcgccggtctccttggcgcaggcctcggctcaagcggcggagctcgcttcctccttgtcctcgtttccttgacggtgacgggcaatgtcggaccctcgatctactcggtcggcctctcgctccaggtctgcttcccgtggcttcttcgaggtcggtcgtcttagctccagcccgctttcccgcgcctcgccgtcgctgactcacgccatcgtctcccgttcctcgcatcagttccacgctacttcctggccatcgtcatcacagctgtctaccttccaattgcccttgcgctgtcgtcccgcttttcgatctatctcagccacttcctctacgtgcgtctcttctcagaccgctccctgccgacggtcttttgacgctaacgtcggatctactgtcgcacctagatcctagcctactggatcgccctctacctgccgcccatgctcatcgaaaacctcattttccgctcgcccgtctctgccggcggccgcgaaggtgccggcacgtacgacgtccgcatctgggaccgccgggccaagcttcccgtcggctatgctgcgatgctcagctgggccgtcggcatcccctgcatcaccgctggcatggcccagacgtggtgggtcgggtgggtcgccgagcgcatcgagggtggcaagggcgacgtcggcttcatcctcggcttctgcgcgtgctcgcttgtcttcctcccagcccggtacgttacctctgccttctcagggacgacctgtcgtgactttgctgacgtttcgcgacgtcttcaggtgggccgagcggcggtacactggcaggtgaacctgtgccttgcctggaccacaccacccttttctttctcctatcactcagggtcactcccgcgcaaaatggcgcggagacgggtcaggacggcgcgccggcgtgcgcgctcgctctatgatgggcctacgtcccaccggtgagggcccccagactagatcctcttggatggacatcgtctagcttggtcccttgcatactatgtgcctctccatccgtttcagaacccctgagccggccgacttcggaggagaaagtgcgttgcttccgagctttcgaccgcgcgcgtcggccaggcgctgctgggctgaagagcgactcgagaaggtgcttcagctcctgctcctcctccatccctcccctgatccctttccccgagtgcatgctcggacgcctcctgtctcgtcgcctaccctctgccgccgctttcaggaccagcccgccgtccagccctttccgccacctccgcgctatgtcgtccgacctcacggagcgcctcgccgccctctcgatcaagctcgatagctcggccgtcgtccaccacggacccgtccagggtgccgcccagtggaaggaggccctccagggcaaggatggtgtcccggagagttgtccgtcccgtactttgtgttgcgtgagcgggccagagctgactcgagcggccttttctgccggcctgacctttagacgagctcaccaagacgctcgtcttcaagcccaaggtgcgtgctcgggcccatcacctcttgtcatcggctcgctcgaggcttacctatctatctcatcgctgcttctcgtcctgctagaccgccaagtcggctacgcccgtgcccgtcgttgtcatcgcctccgaccagaccgagacgtcgtcgggcgctctgcagaagaagctcagcctcaaggagctccggctcgcaaacgaggacctcatcaaggactttttctcgtgctccaaggacgacggtgagctctgctggactaacgaagtcgtccgaagcagccagagctgaccctcgcgtgccactcgtccagtctcgccgctgctcctgacgtccgacctcgtctccaagacgcaggtcatcctctcggcctcgctcgccgcgtcgtcgtcgctctttgccttccacccggagacgagcgccagcaccgtcttcctgaccggcgccgacctcgccaagtacctcaacgcgctcggcaaggttgccgaggtcgactttgaggccctcaaggctgagtcgcccgccgctgccgcgccggccgcgcccgctggcgagaagaagcccgtcaagtcggaccgcgagaaggctgccgccgacaagaagcgcaaggaggacgccaagattgagggcgctgatgagctcgcgattggtgtacacaaggagctcgacttccccgagtggtaccgtcgtgtccttgtcaagggcgagatgattgagtgcgtcctgatgctcggcgacccgacgagttcctctctgacagccatcatcttcccgcgcagctactacgacatttcgggctgctacattcttcggccgcaatcctactcgatctgggaggagattcaggcctggttcaacagcgagatcaagaagctcggcgtccagaacgcctacttcccgatgttcgtcgccgcctcgcggctcgagaaggagaaggaccacatcgagggctttgcgcccgaggtcgcatgggtcaccaaggcgtcagtcactctgcctaacacgtgatgttgagtcgcacaccgatcgctgatgcttggcctgcgcgacggaaatacagcggcgacaaggacctcgaggagccgatcgccatccgtcccacgtccgagacggtcatgtacccttgtgtgtttccattgggcccagcattagcgttctgaaggctgactgggccactcctcaccgtcgacagactacgccaagtggatccagtcgcaccgtgacctgcccctccggctgaaccagtggaactcggtcgttcgttgggagttcaagaacccccgtgcgtcttcatcctctgacctcgaacgcaaccgctgctcccggctgatccaccctttccgcatgaagagcctttcctccgcacgcgtgagttcctctggcaggagggccacaccgccttcctgacgcaggccgaggccgaggaggaggtccaccagattctcgacctttaccggcgcgtctacgaggagctcctcgccgtcccaatggtgcctggtgtcaagtcggagaacgagaagtttgccggcggtctcttcacgacgaccgtcgagggctttatcccgacgaccggccgcggcatccaggccgcgacctcgcactgcctcggccagaacttctccaagatgtttgacattgaggtcgaggacccggcggcgacgggcgaaaacaagtcgaagctgcacgtctggcagaactcgtggggcctgtcgacccggtcgatcggcgtcatggtcatggtccacggcgacaacctcggcatggtgacgccgccccgggttgcgccgacccaggtcgtcgtcattccggccggcctcaaggttgcgctcgaccccgcggtcaagcagaaggtactcgacgccgtcgacaagctcgtcaaggacctccgccaggccggcgttcgcgtcaaaggcgacacgcgcgagatgtacacgcccggctggaagtgggctcactacgagcagatggtgcgtgtattgctcgaaagagacggcgacgaacgcgtgctagtgctgactcggccaccctcgctcctaccagggtgtcccgctccggctcgaggttggccccaaggaccttgagaaggagacgatcctcgccgtccgtcgtgacaatgccgtcaaggcctcgcttcccgcgggcgacattacatcgtcgatccccaagctgctcgagcagatccagcaggacatgtttgacaaggccaagtccgaggtcgacggccggcggatcgtcgtcgagaagtgggaggacctcgtcccggtgctcgacaagaagaacacggccattctgccctggtgcgaggagcccgcctgcgaggaggacatcaaggaccgctccaacaaggagtcgctcgccgcctccaagctggaggacgacgaccgtgcaccctcgtcaggcgccaagacgctctgcatccccttcgaccagtcgcgctggccgtcgatcgagggcaagtgctgcccggcctgcggcaagaaggccaagcgctggacgatgttcggccgcagtacgtccgccctgagctctttgaaagacccgcctcccgctgacgtggccgctgcaacccacaggctactaaacgtgcgatcgaatcgaggttcaaaagggccggccgatgagccgcgctattgtatgagatcccagggagcagctggcgtcggcggtctttcgacgggtgcacgtgcaggggtcggcggcaggcttctcagccaaagatgtcatcaatctcgtcgccggccggccgcttgatacgcttcttcttcttgacgacgccctctgccaacgatgctgccgcgctcggcttctttgggacgagcaggctgtcgaaaggcgaggatgtcggcgttgcagcagcgtcctgcttgccgagcaacggcttctttgccttgtgtgtcggaagcaccgtgatgtcatcagcaggctcgacagccgcaagaggacgcttgcgtgctttgaccttggcgagtggcggtgatggcggcagcggcgagggcgctggcgaaggcacggtaggtgacgatgcggcagagggcgggacggtgcgcgctggtgcggcagtggcagtctgaacacgccctgctactgcggccatcccataatttgccggcgccggcgctagtggcgagggcttgagcttcttcggccgaacgatccgctcgccgaggtcgacggccgcaggactggcaacggaggagccgggggcggatgaggccggcgtctgcgtcaagctccgctgaacgacctggcccgtctcgacggcgagggccggcggcaggggacttccttgcggcccgctgctgggctgaccagcgagcaggggtagcttggtcgagcttgagtcagcttccatcagcttgcttgaaacggccgccggggcggctggccagccttcaagagaggggagcggccgcttgaccgggaaatcacgctgccaggcggcagcaatgtgaccatagaggataccgcacagactccagacgcgcgaggcaatcgcgatgagggtcgtgatgagcggaagaaagtgggtgaggttgaggatcggcagggcgtgctcgtgcaggtgcgaggcggcgaggaagagctgcggggaggttggtcgttgacgggctgctggtcagctcggtcgagcagctagcttcacgctggcgtgagcaggaaacgtacccggctggtcagctgggccagacgtcgaacttcggcatgtgaagcgccctctttgaggcctggtccaacggcgggcaggagccggcggccgacgcggtcgacctcaacgacccgacgccagaagagggcgaggtggtgctgcgagtggttcttgtagtggatccgggcgaggatcgtcaggtccgtctcgaggtgggttcggagcgagttgacgaggcgggcagagagcagcgtagggcccgagaagctcatagcagcagcgagaggccttcggttgaggtcgagagcgccggagcaaaggggctggctcggagaccttcgagcgattgcgagcgagagcgatcgccctgtgagtcttcaatcggcagccacttcgacgttttcagaaagtttaagacgagggtcgagttgcactgacggagtgctgacctggaaaccccgacaacccgccgccctgctcttaaagctacagcatgcgtatctagcagacgagtgaaaggaagctacaggttgtacggcagctcgtcgccgttagcgatgatagtgccgaaggctcgaatgagttcgacgaagccggttgcgcgtagcgcctcgttgacactgtgcaggctcgtcgtcgagaaaaagtcgtcagggctcactgtagaggagcgtgtcgcggcgattagtatgcgatctgcttcagaggaaagcgagggcttagccgcaccgtggttgtaacggaagatgttcgggctcagtcgccagtagtgcacggtgtcggtgttgaacggcagcagagccggcgtgacgatgatctcgtcgcccttggccacgtcggcagcggtgtgtttgacgcgagaggcgaaagtcgagcggaccgagccggccatgagttgccaggcggggctgtcgggcgtcgtggcggtgatcggtgcggggtcgaacctgcatggcgccggtagagtcagcacccatccaaccagaagtcgtgcttgtaaagcgccttcgctgaccattcccggtagtgctcctcgacgacgacctgcccggcgctcgggccagtgctgatcacctcgccaaaggccgtgagcgtcagattgagctcattggctttagtcacgatgagatcggtgatgtgctcgcggacggccgcgccagatgaatctgctccaatccggtggtggacgacggcggaggcaacctcgggtagggccttgagggacgaaagcagagtcagaaggaggctcggttcgaaggctggagtacggacgtacgttgaccttgacgcctccagagcttaaggtgaaggcctgcgtcgtcgcgatcagcttgccgacgatcgggtggttcttgaggtgaaagttaagcgcccagagaatgtagtcgctgatgagcgagcctttgatggccagccaagcgtaccacggcaggtcgacgtgggtgacggcgcagacgaggccagcgtagagcggattgttgcgcgtgagcatcggtgggtgcgggttgttctcgaggtgggagatgagcaacgcgaggaagccaatggatgtgtgcttcccgtgcggcatcgaagcgtggccgccagtcgctgtgacagtgatgcgcgcgttgccgccctacagtcagcgccgagtaggtcagccacgatcgctcgcacgaggcaagtcggacgagatgcacgcacgcccttttctgccgtcccaaacgcagcgaccgtttggccgagggcagtgatgtagcctccgccctcgtcgacgatcgcggcgatgccgtggtagccgtacttcttctcgaggaagggagcgatcgtgcctgcacctcggaagccgtagatctctggaagcagcacacagcggggtcgaggtcagctacaagggtgagcgacgatcgtacaggaagacgcaccctcgtcaaagccagatgcgacgatgaccgtccgctttggcgagaagccggcctcaagcatcgtctcgacggcggccatgatgccgatgaggctcgacttgtcgtcgactgagccacggccccaaatgtactctccgtcgtctggaggtcgaggagggcatgggggacgtcagcaaggcgctagtgtcgatgacccaagatgttgagtctggacgcacagtgaccagagtaaggcgggtgaagccagtcgccgagcgtcgactcctcgcacgggacgacgtctgcgcgcggccagatgcagccatcgtcagctgaaggactacgaatgatcgacatcgaaaagcgcattaccctgatgcgccaaaaaagcgatcggcttgagggacgggtccgagcccttccactcgtagacgaggccgtacgtgttaaccttggtcaggctgagctcggcgtgcatccgcgggaacgcccgctcgaggtaagcatggaagccggcgaacttctcccagcggccgtcgacgccgacgtcgcccgaatcgtcatatgattcggtttcgatctggatcgactgagagagccagtcgacggcccggccgacgaaggctggcgcctgccagatctcgtttgcggcggcgaaggccgagctgttcggcgtcaggacggccggctgagggcaggcgttctcggccgagaggccggccataatgttgggcccgttggccgaaaggacaaagatcccaagcgcaacagtggcggcagctgagcgaaggttcgaccggccaaggcgaggtgtggcctgctgcgtgccagctgggcggcggccagaggcggcgacgttcgtctttttctcggccatcgtgcgggagtcgctcaagagtagcgaggagggcagaggtagcggtaggctgcttcgtaagtttcgagatggccgttggaaggaaaggaaggaaggctttgttgggaaggaaggttagccggcacatctggctcgaccctcctctccgctgcggcggccgtccatcaccccaacgttcgccaggaccgacggacccccgctcggggccgacgccagtcctgccccgaccagtgcctgaccgagagccaagcattgttgcttcgaagacgggcctgacgggtgacgcgccactgagctcggatgagtatgctggcctggcgacggatccgcaagcgttcggaggaaaatcgtcggccgcgggccgagacagaaagccgccccccgccgtctcttccgcgcctctctgccttccagacaggcagcagctgagtcgggaaacatctatcaatgtcgagtaaaagagaagagggaagccacggcagcggttccgggaggagaccgcgtagtctacgatcgcccgcgcgcgcgcgccgcacgccggggtccgatccgagaagcaagtagagagaagaggagaaagtcgcgagaaggcggtttaggccttggcgatctcgacaccgccggtggcgccgagggccgacttgatgctgccgtagagaccgaactgaccggccgtgatcgaaccgatcatgacgaagcgggcacccatgccaccgaagaggcccttgatgccgagctgcgacgagagctggagagggaggcaacatgagggttagctgactgccttttgggcgcgagagcagagagcagacgacggaggcgacgcacctccatgatgcgcgagaccatgccctgtccggggcggccggccgtcttgttcatgcgcgaaaggagggtgtcggcgggctgcgagatgaaggcggcggcgagaccagcgatgagaccggccgtgaggttgaaggcagtcttggtgccctcggtgagctcagtgggcttcttgccggcggccgtgcagatcttctcaaaggcaacctcgtagacggcgaacttggccatcgtgtaggggacctgcttgaagaggataggaccgaaaccagcgtagaagccaccgatgccctcctccttgaggatgcggccgaagccgccggcgagaccggacgcgaaagcagggttggagacgagacggatacggacggcctcaagcggctgcgagagagaagatcaggtccggcggttgttcagcaagcctgtcgcttaagagttgacagcgcaagaggcaagacgcacgcaaagggcaacgtcagcgaagaactcagcgatggcagaggcaccgaggtagatggcctggcggttctcgcgggccttctcgacaccgtagtagtcgacggcctgcttcttccagaactcgtaaccgccgaacttgaaggcaccctggatcgagtagccgacctgtgaaagaagaaagcgcacgagaggcggtcagatcggagcttggcgaggcagaagcaagaaacgggcggcgcacaatggtcgggccgagaccggtgaggagggcaccagcgccgttcttggcgatgatggaccgggtggcgtggatcatgccctagtagcaatagaggcggcgtcagttccgagacgcgacttttcgtcgtcagcagaggtcgagcgaaccttgttgtacgtctggggctcgagctggatggtcgtcttgacgacgtccatcggggtggcggcaccgtgggtgatggcgcaaccggcggcaccggcgagggcgaacctggaggtgttaagaggtagggtcagcaaggctggaccagaggctcgccgattgacggtggatgcggagcggctcagcgcggccgcgacgaaaagacggcggcgccttgggccgacgcgcgccaggaggaaggcagcgccgaaaagcaagccttgcgaccggcctgtcgctcgggcgtcgctagcacggcctgccgagcaagatagtacgctgcagcatcctgtacgagtgaaaatggacgaaccgggcgtagaggttggcaccagtgggcttctcgccggcgacctcgagagccttctccttaacctgctggcccttgagctcgacagccgaagcgaccttctcggccttctcctgaacggaaaggatagggaaagccgacgcgaacatggcagaggggcggtagaccatctttgtggatttgggaagggagagaacgagggggtgggcgtgaaggagaggggaaagaagggcgacgggtgaaggccgctccgttgcgcgcgactcaaattcgagctccgccccgcccctttcgcccgcccgccgccgactgcagccgacggctcccgacctggcaccctcttggctccaacggcagtagtcgatgccgcgaactgaacctagacgacgactggcgcggatccgagcggttcggccggcaaatacgacgccaatgacgaggagagctcactcggtcactttggcctcgcagcatggacccgacggcggcgtggcacggctgtgcaccttgctcctgctgggagactgcggcggtcaagaagcagacccggagagtcgtcgagcaggagacgcgcgtcgcgagcagcctcaagatatttgacttggcgattcgcggctgaccagattgcggctgacagtttgacgatcggatgagcagcggcatgtacatcctcgggctgagacggtagctggtccacgggcgacgacgggcgacggactgaagcaaagcaaaagtacggcggagaggccagcactgtgtgagtaaccgtgacgagactggacaggaatgcgcccgcagaggccgcacattgaggtagtggcagcgcaagaagcggcgtgcgggtgatcaagaaaggccgtcgggcgatcaggcgtcgcctggcagagtagagcatgcctgtcagcgttcagaaacgactcgctcgaagacgcagcgtgacgggacgcaccggtcgccgagggagcgtctgcgccggacggctcgatcggcttgccgtgacgtacgttttggtgacggaagaggcggatgctggttggtctcagcaggcgagctgcctcatcaagccgctcagtgagaacggtctccgtgcttctctcgaagccgacgtgagcgccatactggagtttgaggtgagacagcagattgtcccgatttgcgcgaagaatccgcgaagccgccaccagatgaagagagtcgtccgttttgtagctgcccgaaggccgggagcgtttgcgtcaaagtcgaagcgatgtcgactctcccagcggaaggctcgcgcagggccgtcagaatctcgagggccccggctgggaagacgacctggccggagcagatcaagtcgagctcgtgcaagctggtgaacggcttgatctattcgagctcctccacgcggtcgaagctgaagtgcagcatctcgagtgaccgcttgtcgacgatctccgacagctggacagccttgtcactggacgacggcgttggcggcgctagggtcacgtggagtgtcgggagacgcagaggcgagcgagtaaagtcgacctcggagagccgaccgttgaattgaaagttgtagaagtcgttgaggttggaagagatggccggagcgaagatagaggccacatcgctcgagacgtcgtcgattgataggttgccgcagtcgacaaagcagctcatgctgcggacgtggcgaccgaggtgagggtgaacggcactgagctcgtgcggctcgttttcctcgcaagtttgtcgaagaaatttgtaagatattataacaggataccttgagcctcctcctatgggcagggcgaaagcagcgcatcgaagtcagcaacgagcatgctgccgggcccgagatcgaccaagatgacgcacccgccaagctggcgagacgaggctcagcgtcgacagcgtcctcatccagaggtcgtagaacttctttcccacgtagctcatgtagagttcgtggaggatgaggagctggacctcgaccggctgcttgggctgcttgtgggcgtgctggcagcagacaggggcaatcgaagggacgcaaggccgtcagctcgtgatgccggactggcagcagcatgcgggacgcacgagacaggaggagaggcacatgacgacgagcaggaagttctgatcgtgtcgagctgaggagggtgaaatcagagaggcgaggatgcgaggaagcgaggtggtcgtccggagggaaggtcaagcggcttgccggccgggcggctcgtgctgcgcggccggcgactctcgcgaccgatgagttcgcccggtccacttatcgttctgcgcaaggatgctcaaagcgacaggcaagaagcggaagaggcacgatcatatagatagcttcaagcccagcgtccagccttgaccttggcgccaaagcgcttgacgagcacgccgaccgtgatcggcccgacgagcgtgttgagcagaatcgcccagatggcgacgaggaagccctcttctctgagcaggcgcgactcggtgtagccgatctgggcaatgaggaggccaatctcgcctcgggcacacatggcgaggccaagaaaggcggccggcacccaggcgtgctcggccattgacgagggcgacgccgctgagaccgacgttgtcggatgcgggagggccgtcggctcgagcgagggcgatgagggaggtgcccgaggccggacggcaggcccgctcatctcgcgcatcgtgccgtacccgcgctcgtctggctgaggctcgccaagccggtgtacgccggcgccagacttgaagaactcggcgtccgttgcggccgaggcagagttggttgttgctcggcccttgtcgcttcgtcgacgctcgaagtggtcccagagaaggatccagaagccgcagaggagtttgccgacgagcatgagcacggcgtagacgacgccgcgccagatgatccggcccgaccagagcgcgaggaaggggatcgcggttcctatgcttgcgaagaagagcggtgagaagaaccaggtctgcagcggcaggaggtacgtctcaaaggcctcgtggaacgggtggactttgacgtggaccgagggcgcaggcgtgttctcttgcgagcggagcgcttcgccgatcgcagcgtccgccgctgccgtttccgcaggagggaggtacgtcaagctgaggccgatgatatagacgcctaaaagaggcgagctgccgatgaggccagtgatggcgacgccgagtgataagcctgcgatgacgccgatcagggcgagctttggccgctcgggatggcgcatcaggcgggcgtggatgaaacgtcggtagagcggggcgaacccgaagcggacgactgggatggcgagaatgatgtagaggaaggaggagacgagcggccgggcgaccgaccagggcgcaattgctgagggtgggcttgtctcgccgagcgtccggatgatggtcgacaggacgaagccgatgactgcaaggacaagcgaggtcagtcatcggtcgcagagcatgatgaccagcgacgcaccatcatcaaagacggcaccggcagcaaggaccgtgccgatccgcgtcttttcgagcccgaggtcgccgccagcactgcggaggacggtgaaagtcgtcccgagcgaggttgagctgagggcggcgccggcggcgaacgactcgagcagcgggtagccaaatccaccgctgtagattgcgagcgagaggaggataggtgcgccaatgccggtgagagctacagccgtggccagcggaagggaggcaaagagcgtgtcgagcggggtcgacaggccgcctgcgtgcgcagcgggtcagtacatgcttcaattcgccgagcggtctgcgacaacgcaccttcaaagacgatgagcagcaggccgaggtagccaagcgtaaggaaggtctcctcccaaacgtgctcgaggatgccagcgagaggcgagccgaagatgatgccgacggcgatttcgcccaggaggccggcgtagaggctgcaaggagcgagggagaaagcgtcagcccctggcaaacaggagagcggcggaacggaagggaacgcactacttgtcgacaaagtagcgggcgacgttggccaggtagaggaacgacgagaggataaggatcggctcgaggtgcggctcctcgtacgggatgtagcgcgtcgacatggctcggagttgagggtggcaacgagaccttgaagagtgcgtattcgcaagagcaagcctcctttgaccgctggtcgaactgctgggctagctccgggttgtcgacagattcaggccggtctttctctgacgtaggtgcgagcggtcgaggtcgactcttggcggagggggctgagaacagcgcgccggcggccgctccgacgtgtgctcccgacggtgaccccgcacgcctcgacctcctcctcctcttaaaccaacacagcaagggcacaggttgtcctcggagctcctatcgctcgctacccgcttcactgtccgccggccggacaacccttggctttgagaacggatggacgctgccgacgacgcgccgcgggccatggtgacggccatccaccggtcgctcctccggcctagggacgtcgactgccccaacacggtgccgacgtgctcgggctgtgctcctggctggtcgtgtgtcgcgacggcgaggtgcgtgacgcctgcgtgcacgtcagacgaggtgaccttgaagggacgctgacggcctgctcttccttcctcctccctgcccttggcttggtgccttcctcggccggcgcccgcgaaacgacacgacttgcatcgacgactgcgcgggtctgtcgcctcgccctgccccctcgctctgcaggacaaagacgacgtgtgcaacggcgacttgcgtcaagaacgagacgggcagcagctcgggcggcggaatcaacccgggcattatcgccggcccggtcatcggcttcgtcctgctccttgcgctcgccatctggtgggcgcgtcgacaccgggtgcgtcggtcagctctcgtttgagacgacatgcgcagagcgctgacctatctcttgtcccgccgtcgccagatgcgcgaccttgccgagctctcacggcttgaggagcgtgccaagcggctgcaggcggccgagtcggaggtcctgacgctcggcatccgctcgggctcgacccagcacactggcggtggcgggcaggacccgtcggcctttgcgctacaccagcgcactcgctcggctggcggtgacggcggcgcttcgccgactttcccaggctcgggcttgcagacgggcgacgagcgcgggcagcagtcgcgtcaggtctacacggcccgcagcatcaacctcgacccggcgcacccgagtaaccgattgatcgacgccgagcgccagtcggcgctagctggccggggtcagctcgaccccttctcagacgccgcctcggagcagtcggccggcgacggccagtccttcctctcgatggggaccaacgtgattccaatcgcctacgtcccgtctggcgccgatgtcccagcgcccagcgccatcagcaactcgcccctgcggcctctgcgagaccccaacgtcgaccttggcatgtctcgccgcggcccgccgccctcgtcctttggcctcgcccggccgccggccttgccgccgtcgacaaccggcagcatcggctctgcctcgcgcatgagcgtcatgtcaggcgctccgtcgttcatgtcgtccaattcgtttgcgctcgacgcgccaacgatctccaaggtcaaccttgcgagcgctcagcgggccaacattgtccagattggcgccctcaatcacccccgaccgccgccgccgccgccgccgccgtcgagctttccagcaaacggccagcggccggcccctcatccgcgccgaccatcaaacgccaagtcgacgacaggcaagtcgccactgtccaaccttgccgtcgcctcttccccttcgcccggactcgacgcggccgacccgtttaacgacgccaaccagtcgctcacacctccggcatcgccttgccggtcgtcgtcacgcgccaacacgtttggtcgggatgaccgctcggagcacatggcctcgtacgatgacgacagcaatgtctctgaccactcgtttgcccggccgacccggccgtactcgagcataagcgagcagtcgcaggcgagcgccgtccttcagcaggcgacgctcgtccgacttggcatcccgcagcaggcgccacaattcctccgggccgtcccggcagctccgccggcccctcggtccgacccggcccacacgctcggccagccggttgcgccatttgtaggcgaagccggcgaccgctcgtccggctacacaagcgcctctgcttcgtcgctcctccgcgactacacgttcacacactcgtcctcgacgtcgcccgtcacggccgcgttcccctcgtccgagtcgacctcgacgacttcgctcgcctacctgtccaccctgccactgccggcgccgcagccagccagctccgtcactgcgccgggtgcggccggcaaccgcgagacgcagtattcgctcgactcgacgtttgactttatgccccccggcgccgcaaccgaccggtcggatgctgcctggggcgcccggcctggccaggcgccgagcgaggccgtgcgcgacggcgatcaagagtttgtcatcggcgactgacttgtgagctccggcacttggaggggcgctggccgcctctctttctctctttccctttactctattcctttggaacttcgtacatgtgctttctagagagcctacgagacggcttaagtcggtcgcacagcgggcagcccagcctctgacccgacgacagctttgctaaatctgctgaatgcgatacaacgaggacgcgtcctcctggcggccctactgaccctcctgcttagcggtatggtcggcgagactgcccctcggcgcccagttgttgacgaacgcccgctggcttgcctcggtcgccgcccgttctgaaggagcgccccacccccctccgcccggcgtcttcagcagcagccggtcgccggcagccatcatgaccgaggcctttccgccaatgttgaccgtcttggccggcgcctcggacccgtcctcgagccgagggcccttcttgatccagtggttctcgcccactgcgcccgggaggccgccgtgcatgccggacggccggttcacgcgccgctccgagaggatcgagacctgcagaggctcagtaaattcaaactcgcggacgacgcccttaccgccgttgaacttgccctccccgccttggccgtcgcgccggatggcaaactggtgaaggatgaccgggtagcgccgctcggcgagctcgacgtcggtgatgcgtgtgttctgaccgagcctcagtgtcagctgatgaagcggcgacggcgtgctcgaagccggcgccgcagacgcaccgtcatgtggacctgaacggcagaggtgccctcccaggtcggtccagcgccgctgccgccgcagatggtctcgtagtagccccagccagcctggacgttgccgtgctcgtctttgccgccagagccaaacgtcaggttgttgcagcatccttgcgagtctgcgcaagcgttgaaggcctggcaaaagcagagagcggggtccgcatcagttccgagtgcttctcctgctctcggttctgctgaaaccgaccttgagcacgacgtcggtcacacgctgactcgtcacgactggaagagagagatgagattccgtcagctctgcggctttgagagggagagacggagacactgaccattcccaccgcagacggcagccgtgtcactcggcgagaggaacgagtgcttgggaatgcggacgtcgattggcgcgaggcagccgccgttcaagggcatgtcgaccgcgcagagtgcccggaggcagtagatgatggcggcgtggacgacggcctccggcgcgttccagcaacctcggacctcaggaccggtgcctgttgagcgaagtagggtcagaccgtgaccagcgacggaggaaagatcgctacgcgccctcaaaatcaaagacagccgagccgttggtcgggtcaatggtgatctcgagcgcgatcgggctgccgtcgtccatgtggtcaagcgcgctcagcttggggccatactttcccgccgtcttcttgagtagctcgcggatagcgagctcggcattgtcgcggataaagtccatgtaggcgtggacggtcggcaggccgtattctttgatcagtttgccgagcagctgcgcgcccttgtggttggcggcgatctgggccttgaggtcgctctcgacgtcgccgaacgaccggcagccagagcagccctcgtactgcgctggctcgtcgaccatgatgcggtagagttcgtcgcggtcgaagacgccagccttgacgatgaagaaggagcggctgccgacgaaggggcgacgcgacgtcagcgacctccgacgcaagcggctgaacagaagaactcaccacattgcgccttcttgccacagctctgtgctcgtcggaggcatgctaccggcaaggataccgccaatgtctgcgtgatggccgcgtgaggcgacgaagaagatgatcttctcgccctcaaagacgggcgtgatcagggagatgtcagggagatgggctccgcctgcacttggatggttcgtcatgaggacatcgccgggccgaagtttgtcgccgtggagatcaagctgccacttaacggtgaaggctgccagagcaagtgcggatgagcgtcagcgcatcgcccatcgtcagccccggagaggtaaggtcggctgggacgcacacatgctgccaaggtggacgggaacaaagggcgcattggcgacaagggccgctgtaggcgagaagagagcgcaagagaagtcgaggcgttcctaccgagaagcagagtgggagtgtcagcagcggcctctagcgagaaggccctccccgcaagcggctcgagcgacagaccttgatgttcgtcgagatggccgtttgctggagcgttttgcccatcgcctcggcaacgctttgaaagcggttcgaaaagatgctgagcatcaccggatctggcgttgagggaggagcgggcgacatggcgaagagaggccggaggtggggcggacgaggccgaggagagatgaggagcgagtttcgggcctgctgctgagcttggctatgtcggtctctggagagagtgctgtcctcttgatcctgtcaggcttttatgggaaggataaggtggtttcagaggtcaggtcagattaaagatggccgtcagagggagccgacgccctcgtcccgacctgaacgacggccgctgcgcgaacttcgacctcctctgtcgcccgacggtcaccttctcttccctctctcgacatgatcgccgaccactcgatccgcgtcaacgcagacagaggagggacctttacaggtctgtgcagagcgggtctgggctcggccgaccgtcctgaccgttgcttccttttctgcagacgtgcacgccagcttcccatcggatgcggccgacgccatcgacggccggcgagagatcgtcgtcaagctgctctcgtctgacccttcaaattacaaggacgcgccggtcgagggcgtccgacgcgtgctcgagatagcgacgggcgagacgtatccgcggggtgatccgatagatcctcgcaggctaggtgcgtcgggtgctcgggccgagctcgcgtgccggcaacctctcttgacgatctctcgtcttgttcctcctagaatctgtccgcctgtcgacgacggtcgcgaccaacgcgctactcgagcgcaagggccagcggacggccctcgtcatcaccgagggcttcgaggacctgctcgagattggcaaccaggctcggccgcgcatcttcgacctcaacatccggcgcgcgcccaatctctacgaggcggtcgttggcgtcaaggagcgcgtcacgctcgtcggctacacgaccgacccgcacgcagccgagcgcgccgtcaagttcaacgacgatggctccgtacttagcggctatgacgggcccgagagggtcgtccgcggcctttcaggcgaggcggtcaagatcctccaggagcccgacctcgacgcgctccggccaaagctcgaggcgctttacgccgacggcttccgctcgctcgccgtcgtcttcatacactcgtacacgttccctgaccacgaactccaggtcggcgagctcgcgcgcgcgatcggcttcgagcaggtctcgctctcgtcgcagctgctgccgatgatcaaggccgtcccgcggggccagtcgacgctcgtcgacgcctacctcacgcccatacttaacgactacctcaggggcttctttgccggcttcgctgacgatactgacggccagccgctcaaggtcgaatttatgggatcggacggcggtctgctctcgctcaacaacttctcgggcctcaaatcactgctctccggtccggccggcggcgtcgtcggctacgccctgacagcctttgcgcccgagatggacgaccccccgcccctaattggtttcgacatcggcgggacgagcaccgacgtctcgcgctatgccggccggtacgagaaggtctacgagacgacaacggctggcgtctcgatccagtcgccccagctcgacattaacactgtcgccgctggcggtgggtcctgcctgaccttcgagcgaggcctcttccgcgcgggccccgaatcggctggcgctcatcccggccctgcctgctgtccgtcccatccctcgttgaccgcgtgctttttgaagctgacatcttcgtgccctgagcagacaggaaaggcgggcccctcgccctgaccgacgccaacctcgtgcttggccggatcctgcccgacttctttcccagagtctttggaccgaatgagaacgagccccttgaccctcaggcgtcgcttgacgccttccaggcgcttgagaagcgcatccgcgcagagtcggccttcgaaggctcgatcgacgagctcgtctacggctttgtgactggtgcgtgcaggctgagctaggggtcttacgcgctgccctgtgctgactccagtcttgccgacagtcgcaaacgagacgatggtgcggacgacccctgccggccgaacattatgcgctacagctgacgagatgccctctccttctctcccattctataggcacgacctatccggacgctgaccgagtcaagaggcttcgacctagccaagcacatcctctgcgcttttggcggcgccggcggccagcatgcctgcgaagtcggtgagtagagcgccgacggccgcagctgagaccttgggggaccggctgacactcgaccccctctcatacagcgcaatcgctcggcatctcacgcatcatcatccaccgctactcgtccatcctctcggcctacgggctcgctcttgctgaccgcgtccatgaggcccaggagtgagtttgagggcgtcgacgcgcgcaggcgctatactgatcccccacccccgctcccttggtaggcccttcgccgtcgattactctgacgacagcttacccggccttcttaagcgactcgatgagctcgaggcgaccgtccgcaaggagcttgtgagccaaggcttccgcgacgacaagggcgagatcaccgtcgagcgctttctcaacatgcgctacctcggcaccgatacgctcatccagacgcagcagccggacgactcgaccgactttgcggctgtctttgagcgcgagtaccgcgacgagtttggctttgtgctcagcaacaaggtcacgatcgacgacgtccgctgccgggggaccggcaagacgtactccagcctcccgccctcgccgctcaccgaattcgccgagtcgaccttcaccgcggtcgacgtcttggcagcgagcaagtcggtcacctcggtctacttcccggcgaccggccgaagtgacgtgccagtcttccggctcgaagacgtgcgtcctctgcttgcctcgagaaccccgccccgtcggcgcccgttgaccagatctctccctcacccgctgcagctcaaaacgggcgaaaaggtcgagggcccggccgtcattctcgacgcgacccagacgattctcgtcgtcccaaaggcaacggcctttgtgacgtcaacctcgctcctcatcgagctcggcagcaattagatgcgctcgcctcacgccgttgtatcccatgcgccccacgccgatcgaccctgcgccgggagaacctcatttgaatttacttgtagaggatcttgctcgcgagcgtgcccatgccgtgcgagattgagcaccgcacgtcgtccccgtccacgagaaactgcgccggcttgaagccggttccgactcctacgtcggtcacaaggcggtcagcgcggggttgctcttggacacgcggaaagtgaaccgactgacctggcggcgttccagtgatgaggacggtcccggccggaagcgtcgacccttgcgaaagccacgagatgatcctaatgggcaaagaggtgcgccgatcagcgcctggcgcgcgcttagcgacgaaggagaccgggcgcacttgggtatgctgaagatgagctccgaggcagagccgtcctgcttgacgacgccgtttacggtcgtcttgagtttgacgtcgttcgtgtcgggtacgttgcgagcggcgacgagtacgggtccaagcgggcaaaagccgtcgaaggctggcagggacgacgcgacacggtaagcatgtcaatctcacaggtctcgcagcgaagcaagacgcacacttggcaaagcaccactgcgatgtcgcgtgctggaccttgcgcgccgaaagctgagggatgtcaagcaagagtcagcacttctgagacgagaggagatgcgcagcgggagacgagaccgacgtcgttcgcaacagtgtagccaagcacacactcagccgcttctgcttcgctaacgtccttggcctccttgccaagtacaaccgcaagttcgacctcccaatcgagctcgtcggcctgcgcaacggccgggacagagacggtcgcgcccgggtggccgatcgaggtcccggccttaaagaacgagacgggcacctcggggatcgcgaggccgcactcacgcgcatggtcgcggtagttgagaccgatgcagcggacagtgccggcctcgagggcgctcacggggctcagcagctagcgaacggaccgagggcgagatgagggtcagcgcgaggcgacgtcggcaagcagcgcgtcgaccgacctcctggatcgtcagggttgtgctcgagtcgacctcggccttggcgtcccatgcgttcgacgccttgatcttgtacgccttgaccttgtggccttcgaggacggcgaggccgactgattgaaggcggtagtgcaaggggcgctcgttagcgagcgatctttgactgcgggcgacgggcgctgaagacggaccgtcgagctcgcggtcaaccggctcgccaaaatggaccttggagtcctcgacagcgatgaagcggacaagacgcgtccagggctgctcgggcgtgtcagccgagagccggcctgatcagtgttcagccggagtgtgggcgagagagggaggttgggccggaccggtgcctgtggtcggcaatggcgagcgagcgagcgggcgaggtaacgcacagggctgatggcaggcatcgttctgcttgcgagcgaaagtctgagtcgagggagggccgtctagggtgctctagtggatgatagttaatggggagggagggagagggcgagccaggccgtcggatgaggccgggctgtctttcggccggccatcgccgacggccgagacgtacttcgaggcacgttcagctcggtctcaacgcagatggcatgtgagcaagttgcactaggcttactcgcaggctggactcagacgctctcagaaggccgcctcagacgtggagcgggaacggtagggtgcagggtcgaacagcatgtaatcggatccctgcaagcatgtcgcttgacgtcgtaaactagcggtctgtcggtcggaaagcaacggaggtcatgggtcagcatgagggcttgcttcgcaagcagcagagggagcgggcgaccgacagaattccatgacgtcgtcgcccttgcggacgacgcccttgtaggcctcctcaaagtcgacgggcaggatgacgtagcggttcttgcggacggcctgcagccccgccgcctggcagatggaggcgacgtcggcggacgagagcttgtcgggccgcgagacgtctggattggtcgggcgggcaagggggagtcagctttgcttgggctgggaaccttcgggcgagagacgcgacgcacagtcttcgaggtcaacgtcgggcgcgaggttcatctttgccgtcaccgtctggaagatgaggcgcttctcgcgccggctggggttagggaactcgatcttgcggtcgagccggcccggccggaggagggccgggtcgagcgtgtcttgccgattggtcgccatgatgaccttgacgtttgagccctggtcgaaaccatccatctggttgagaagctcgagcaggatccgctggacctcgcggtcggcgccggtctgcgcgtcgaaccgcttcgtcgcaatcgcgtcgacctcgtcgatgaagatgatggccggcgcgttttcgcgcgcgagccggaagacgtcgcggaccatccggggcccttcgccgaggtacttctggacaaactcggagccgacgacacggataaacgaggccgaggtcgaggccgcgacggccttgacgagcatcgtcttgcccgtccctggcgggccgtatagcaggacgccccgcggcgggtcaatgccaatcttgcggtagaggtcaaactctgtgatggcgagctcgaccgcctcgcgaatctcttgcttctgttggtcgagcccgccaatgtccgagtacttgacgtcgggcttatcctccggccggaggagggcgatcgacgagtcggcctcgggcgggaggatgtcgacaagcgagtgcgagtgtcggtggagcgcgaccgacgacgacggcttaagcagttcgcggtcgagcgtcgacaggatccggacgacatagttagagcctaagggcgacagagtaggggaacagaaggggctgtcagcacttgtcgctgctggacattgacgctcgccgtcgtcgggtcgtcggggcgcagctgcagagacgcaccagtcgtgctgccaacgatgcccgacttctcatcgattggctcgaggaactggccgatgacaagcggtacactctgcgtgcagaaaagcgccgcaatcagatgagatgcactaaagaagagcggacagcagccccttgagggcgacgccgaaaaggatgtcgggcagtagacgcacctggatccgcttgacctcctcctgtgcgcgcaagagttcgcgtcgaaggttgtgcgtctcgtagatgatgtactcctgcggggcgcggagagagaacgggaggaggtcagcgtttccagcttgggtggtagctgttggcacgtcgaaggagtctgcgggggctggcgacgaccgactgccaggacggccgcgccactgcccgcggtcgccttgtgctcgtcaaccagctagaaatgagagagctccagcagactgccgggctcaacacccaagaggtgctccaacctcgtccaccttctctccctcgtaacagcctccgtctgccggctcgacggcctcttgagctcgccagatttcatcgtctgacgtacctcctgcaggtcgaggaactcctcgtgaccctcaagccgcttccactttgcgtagagctcctctccggcgccgctacccgaggccgtcgccgaggcgaggatggccgacttgtcggcgaggacagccgggagggtcgggtcgaggtcgatcagcggcttggctgggccgaggccgagctcgtccatcgttgtgtcgtgaagaaggtgctggtgggaggcgtagatctctttgtgctaggtctgctagttgctgtgcgctgctgctctgctgtaggaggtcggtcgtgtcggtcgtcgatgctgttacaggcgaacgaagatggaagctggcggcggcgtggaggctgctcacacctttcgggggaatggaaaccccgacggggctagaccgggggaagacgccggtctccgccgaacgaggttgcgatggatggcctgctcgacctgtcactcacccgctctctcagtcgcacaacaatgggaagtcagtccttcgacgagagccacggcggcagctggagcggacgtcgctctgggcaggaggcagacttccctcgagcgatacccaccctccggacgaccggccgttagcgtagaccgactgaccccgtcgtcgtcctccttcttcgcctcgctcgcagagatcatccacatcgtcctttggaaggtccagccccatctcctgctgtcggctccgacatctcgctgaacgtcctttctctgcccgtttttgcagctcgttaagcccccggccgggaccgacgtcgccgcccaccaggcgcgcgtctcaagcgcgtttgagaagctgttaaccgtcccgggcgtcctgacgggccatgtcggcccgccaaagattgccgaccgggcaaagggctttgactggggtgcgttggccgggcccttggaggagcgacgaaccttggctagctgggagctaacaacgacgccgcccccgctgtggcgcaggcttctactcggtcttcgagtcggccgagagcctccagaagtacgccgtctcggacgcgcacatgaagtgcgtactcttgttgccaggctcatgcactcggcctcctcggctgactcaccttccgctcgctcgctctactctgaaggatcgtcgtcgaggacatccggccggtgaccgaagacgtcctcgctgtccgtctcccccccccctctcatctcggcaattcgccttgtcactgacgccgtcagctcctctcgcctcagtacgactttgagctcccggaaggtcaggacgcgtaagacgtaatcttgggtagacaggcgcaggaaccctgttccggtcctggaggcctgcaggccggaggcgtcaatcttgtacatgaaagcgacctgtttgtacgcccgctgttctcttccgtgctgtccttgcaagccgagcaggtgcaaaagggcagccgctagtcgaacggcggcaccgacagattttcgggagaaacagaggcggcagctccgagaaatctaagtgcgagatgcgaagagagcgttgtcatacaagccgcctgcacgagacggcggcgagtcggaagggttcaaagagcgagacgtgaggagggtactgcgagcaggccagagatgcgaagagcgtgtgggaaacgaagagggagacgcggccggaggtggcccggtgaaaggcgaccttggcgaggtggtgcaaggtcgttcgcaagatgagacggtctggaggatcggcttagcggccgccgcccatcatcttcatgagtgcgctcatgtctgttggggtcgaggagaaaagcgagacgtcagcgatgagtctggcaaagtgacgactagacaactaaccgggcatgccgccaccaccgccgccgccgccgcccatcatcgacatggcctctgcagagaacaaagcaggcaagcgcgatatcagcacttcaatcggcgccgaaaacaagctcagcaaactcactctgcatgtcggccatgctcggcatgccgcctcccataccaggcattccgccgcctcccgctccgccaccgcccatcatcccgcccatcatcttcatcaggtcgcccatgcccggcatgcctcccgccgcgggcgccgagggcgcaggcgtcgagccgtcgccccggccgttcatcaggtccgacaggagcttggacgccccggccgggccggccgcgcgcatcttgcggagcatgtctggcggaagggcgcgctgcaaaacggggaggaaggttcgagtatgtcagcaggtgtgtgctgcggcaggtgaacgagttgagcgacatacctgaatggccatcatttgctgctggctcggctggccgccggggcccatcggcggcccacccatcgccgcctggagctttgccgcaagggccgcgttgctgcatgcggcgagagcgaggtgggtgagcgagaggataagcaagcaggtagagttgcacgcacgggttagccttgggctgagcaccgccgatcgtcttggccatgttgcccatcatgtggtgctgcatcaggaggctgacgaaggagagaccgcagacaacgtcagcctctcgaagccgtcatcagatgggaggttcgaacgcactcctcgacttcgcgcacgctggtgccgctcccgcgggcaatcgtgatgacccgcttcgtaagaccgatcggcttgccgtccttgcctcgccggacctgaggaggacgagaaacgttaatgtcaggcgaaaagcagtgaggaggccagttcaatgaagcgacacccacaaaacacgagccatccgagtcaagctcccgggccgtcatggcgtcagtgatgtagacgatcttcttgagcttgtcggacgcttcctcctcattaccgtccaggaggcctgccggtaggccggggatcatcgaagcgatcttgctcaggcttcccctgtgatccgagacgcagtcggagggtcagctacggcgacggcggcgagcgtcaacggtagagcgagggccgcacatgcccatgaccgtgttcatctgctcgcgccaatcgcggatcgagatcttgcccttgataaacttctcggccatcgcccgctgcttctccgggttggccatctgctggtcctggctgcaagaggtacgaagcgcgcagtcgcacgagagtcagccagcagacgaccgcggaatgtcgccgtcgatcaaacacgcacatgtgctccatcaggccagccatgtcgcccatgccgagaagcttcgagacaaacgagtttgggttgaacttttcgaggtcctggaggtgctcacccgtaccgaggaaaataattggcgtcttggtcgcggcgacgctacaagcgaaaggcaggcggtcagtatttgccgcgagcgctgggatgggccggtccggtcgaggacaaacgcagagatcgctcctccgcccttggcgtggccgtcgagcttggtgacgatgatggcaccgaagccggcagactccttgaacgccttggactgcgactcggccgcctgaccgatcgacgcgtcgaggaccatgagcgtgagatcctgtggaaatgaggaaaagggtcagagagtgcgcctctctggtatgactcagccagcgccaggacgcactggcgaaacggcctctccaatcttctccatctcctcaaacagctcagtctcctgccgatgccgaccactcgtgtcgacaatgatgacctccatccgctccttcttgaacttctcgacaccgtcccgggcaatgatgaccggatccgtctcggtgtacgagccaaagtacgggattttggccttggtcgcgttctgcttcagctggtcgaaggcaccggcacggaacgtgtcggcgcagacgagacacgtcttgaagcccttgcgcgcgtagtgagcagcaagctgaagcgggggttgaaggtcgggtcagtgaccgaggcgagaggggaagttgacagcgagcactcagactgaccttagtacacgtcgtcgtctttcctgcaccctgggggaagaacgacgaatcgtcagtgaactgctggctcaggctctccttgcctgttcttttgacgacagcccgggtacagcacttcacagctgtgggccgaaagcagctcgactgcagcctagcgacaacctgacccgcctttagaaccacagcggagacgtacctgaataccgacggccatcaaaacgttcggcttgcccttcttcggcttgaactcccagcccttgccatcaccgccggccccgacgccagcgccgtccttgccggcactgccgtcgacgagctggacgagctcgttgaagatggccttctggacgatctggaacgccttttgcggcgtcggagggtttgctggcggctctggtgagagcagcggcttcacctgcaggtgccagacaggatcagctgttggacagaagcggcttgcacgaggtcaagcagagggccgagcagaagctacgaacggtgcgccggacggaggctcggagagtcgagacgagcttgacgttgacgtcggcctcgagcaaggctgcgcagacctccttcaggacgttgtcgagcgcctgtcggccacatagggtccagaagcagggcagtcagcgtttcggccgtgatccaaggcctgggtcgcgtggtccgagaggaaggcaaggcacggcggcgcacctggtcgtcgatggagctcgcggccgtgagcgattgaatggctccattgagccgtcgtccgagatcggccaagaccatgctgggctgatctgtataggataggaggaacggtggaagagaaggcaggcgaggtcgttgttgaagggcagggcacgatctcgtctcagcccgcgctggcaagctccgctcggcgccggcggcagcagtcgccccttgaacgtcgacctgccgctactccctcaatcagcagtgctccaagtcctgaccggttgcaggctgacagcggtcatgacagatctgggatcgcttgtcagaaagacggccgtcggcatctggctcgatgccggtgcgtcctcgtttcgtttgaccttggccagctgccccgcctgcgcgccccgctgctaacccaactgctgctgcctcccgttaggcgtcctcggcagccggacgcacctcgtccctggctttgtcgcttccaacattcggcatctcggcgcaagctacggactgatttcgcggatgacatactacgaaggtgcgttcggggctgctgcaggcccgaggcgaaagatgaagctgacttgcgacccctcccttcggctgccagactgcttcgctaacggctcgcccgccgagcgtgccttccgttccgagctcggcaacgccggcttcaacgtccttcaccggccgcggttaggcaagggggtggaggtgccgaacgcggcgctccgagacgacctgctggacttcattaagcagaagcagcccgggccgagaacggtcatcgtcgcgtgcatctcctgcatatggtgccgcttctgtccctgatgccgtcgatgctgacttgcggccttcgctcgcgcgcactccaggacgatgaacggaagtctggcgccgaccctcaaggcgctcgccggcgactcgcatgtctcgacgatcgtcattgcgcctgagtctatgcgagacgcctaccgaaaacccatcgtcttcgccccactcgacaacctcctccaaacctctgtctcgagcattggcgctcccagtgagcggcccgtgcttgatttcgaggcgttctttgccgctcgccctgccgaacccgatcagccgctgcaggccaagtttaacctcagcgagtggttccccggcggcccgaaggccaaggagaaggtcaagtcaaagtcgctggccgatgcttctcaagccgccgggcggacgccctctgtcgttctgggcaacaagaagccgaccatcgaagtcaaaccggtcgccgtcgacaaggcaaagacctcaaaggcccaactcgacgacagaaaggtcgacaaggacaagccgagcaagtagaagaggcgatcgacattcaccggaaaacgctcgcccctcccaccggctcgtcgaaggctcgctccgctgttgcgagacaacccagcctacctccatcgttcccgcagccgggactgcgtgcttaacggccagctctgcgccgcctcgcctcctctcggcaaggcccaaacacagcagaagcggccgactcgcccgtcgaagctggcccgacaatcaccagtccgcctcctccgcatgcgatcgtcaccgccttcgctcagtggcatcaaatcatctcgacctcctcgtacttcgacatccgctttcgacggcggagggcacaaagggagatgaccaaggcgatgacctgcgagtgcggaaagatgcatgtcagcttcatgttggcctgcagagcgaaacgtggctggcgctgaccaagagagcgagagcggcggcgacctggcccggccgaaggagcagcgtggtcagtttggcttcttcaagaggaacggcagacgatccggcaaactcaccagccagttggcgctgccgagcgtcgcctcttttgcaccctcgtcttcgaagcgcttgctcgcgagcgggaagaggaccatgcagacgacgaacgcggcgagtgcaaagatcgtcgcgagcgcggtaaccgtcgaggcgaggatgaggacgacaggcgcggccgcacagaaggaggcgagatcaaagatgatggcgagggctgagatggcggcggcgattgggttgagaacgagggcatgggaaaatttgtctgggagcgcgtcggcgtctgcgcgagcgaagggtctagctgggtcagccgtctggagcgcgtgcgcagggactagtcaagggcgtacactcgggaccgagcagcgagctcgacacattctcgagatcgtagccgacactgacgtcggaacaggtgtctgcaatgagccagagggtgcgcaagtcagtcaacctggtcacggggccctcttcacatatcctctgacacgcacctgcgacgcagaacccaaagttgccgaagaataccttgcggccctgtgaatgacaagcaagcaatttggattagtctgtttggttctgagcgcctgaagggaggcgcaggagacgcacgtcaatgactgccttgagatagacgagcgacttgttgatcggtgctgaggtagagacgacgaccaggagggcaagcgcgacagcagtgaagagcgctgtttgaggaaggcacagtaggtcagctcgcctgacgaggtaagacggcttccaaggactgagctcgtacctgcaaaggcgggtaggacggcgcggtgcatggcaggcttatgaagaagctcgtcgaggggtcaaagacaagggaaggtggacgtcagccgccggaaaaacgggtcagccttctgtcagtctttatgagggagccgggcacgctgtcgatgacggcgagtgccatagcagcagaggtgcgttcgccggccggtcggctcgccgccttgtcgctcgccgcgccgtcgcttcgccgggttcggaccgtcaccgacctgcatgatcagctagcaacgccgctaattgataagcgagagtgacaggtgtcagcttcgcttgcagtccgtgctctcttcctacttgagggtcgtcaagaggctgccgtcgaaggctcggccgacctcaaagggcgcgagcgcgcagcaacgaccgacgcgatgcggcggcttcaagaggagccagcacctcggccctcttgttcctgccgacgatcacctcgcccttcctcgactccctcaaagcatgcccgtccactcgcagccggtcaaatctcttgtgcctcgagctgtacgttaacctgctgtcgagctctatgggcctgccgctcggccgcccgttggacgaccagaaggctgacccctgtctgcttcagcttgccttccgccaacgccagcaacaccggctgccgctcgaaatccagcttctcatcctccacaaggcgtgtgagacaaccattgttcttgagtgctccaacgacttagatgcgacgctcgcgaggttcagcctcgtttcgtcggcttggcgagtacggcctctgacctcaaaagcggctcccgcagagcgacgattgccgacctctctcgatccgtctggcaggaggcagctcaaagtttcttgtacaaggacctgtgggtcgatttcgacgaggaggggacctcgaatgatccgcacgagctcgtcgccgaccatacggctctcggccgccacgtccgcggcattgtcttcaacatcgaggtcgagccggcgtcgacaaccgagaaggtcctctgtaaggtagccctcgtccttcgatcgagccacctctttcccaacctctcgcagatcgactactttcacatttgcggccgtttggtcgagctcgatatccctcgctcgcttctgccgctctcaaagcttcacatgagcttcgtgccgctcacgccgtcgtccagtgacaaggccgtgtctttgtcggagatcatcgacacgcgatcgctcgagacgctgtactccggcggcttcgttgaggtcgaacaactcggacacatcaagctgttcaccagcttgcacgagcttcacttgatctgctttggcttggtcgtcctcccagccggagccctcgagactctgacgctcctgcgccagcttctcttcggcagcgtcagtattttctcggtctttgtccagcaccttccggccctcgagcaattcaaggtcgtgttcgcgtccgacgtgctcaaaatcgcgcaagcctcttcccccgaacggcagctccagccaaagctcaccaagattgtctactcgggctgggccatgattgagccgctccctcagatgattttcaacgcgcggctcgacgaggcggcgcgcatcctgcggccaaatggcatctccctcgtcgaccagcatgatagtggcacgaaaagcggatcgccgcgcctgaagccgaaggcaccttgctcaacggtgcgtcgagccatcgtctccagaaggtccagaaggcgcggcgcaaatggaggctgaccactacttatcaaagtcctctcttcagcgcctgacacagacgcttgacggccgctcgttttctcgcgggtctcgcctcgctgcctagacccataagactgctcgtcttctttcgttctgactggttgtgcttgtggtctctggctggtgattatgtggtcccttcttcgttcgaaagtccccaatcttgctcctgccctagtgtcaacctccgtctgtctgctgctcggccacgccgctaccctccgccggctgttgaccattggagccgccgcctgccgctacacacccctgctccttctgccaacacttgccaaagaccatcgacatgctcgacatttcgactcgaagagaggcgcatacgattaagtctgacgaccgccagaagcggcgccagcgtagtctagaggaggtcagatgtaagctagagttcagacgacagcgacgacggtgcaggagtgagattcgagctggcgggtgcgggggggggggccgccaccgtccccagccgcccctcccggacccatcgccctctctcgacccgacagacctcccggcactctctctcactcgaccagggcttgccaatggccagcgcgtcctcgtcggccgtcctcggcggcgcagcgtcgcatccggtcgtcggcggcaagcagccccgggcgtacacgccggcagcagcttcgacctcgacctcggccggccctgtcggcgtcgcctctgggtcgctctcgtcggcctcgagcgacgaggatgccgagggcgaggatgacgacgacgacggcgacttccaaggggcgaacgaccaggctgaaggctcggggtcgtccgcaagcgacgacgacgacgacaatggccggaggcagcagcagcagcctccgcttcggcagcaggaggccgagtcagacgacgacgacgacgaagatgaggcgcccgtccagcctcgggtgcgcaagctcaagctcgtttcaaagggcaagcagcgccagcagcatccggtcctcgacgaccccgaggccgacccggagctctacggcctgaggcgatcggttcgtcctcgctcgctcgctcatccgtcttgctcgtgggcacgtgaggcgatttgctgacattccttcgtgtctcctccgctgcgctgtttgacgacttcaggatcgagaccgcaagacggccgagacgtcaaacgtacggccttcctttcaatcttgacacgcgcccctttcgtcgccttgcctgttaccctggttgccgagcgtcaacgctgaccgacctccctgtctgctttcagacgtaccaggagagctcggcagagggcgagtcggagaacgacgacgacgacgcggcaggcgacaacgacgatgacgatgacgacgagacggaggacgagcagccgcgacgcaaacggccggccaagaagaaggcaaaggcgtcgacgtcgcggggcggatcgagagccaaactgaatggtgcgcgctctctcgacctgcattgtatctgcagaggaggtgacgggtcgctcacgctcgggctctttcctgctctctgtcaatgcgcagcaccgaacctgttcgtgtcgaaggcagctcaggccgagaactcggactcgggcgacgactatgccgccaagtcgcacaagaagggggccggtcgcaagacgaagcgcgcccggtccgagaccgaggacgacggcgggcctcgcggccggccaaaggaatactcaaagtacgacatgagtcaagtcgactacgggctcgactcggaagacgacgaggagatgcagtacacgacgacggtcgccgtcgggtctggtgcgtgcttcctctcgtctctgcacggtcctctccgcctagcgcccccactgggcctggctgcgggctgcaccacctgacctgacactcctcgcgacccgatctctcctcccccccttcaaaagcggacggctcggaagagattgagctcgtagtcggtcacatgcgggacgacgagcgcttgagcgacccggccgacctgccgcatcagaacctcgttcgtccgacctctgggcgtcctggctcgagcgcgtgttcaggagactgacgcttgcagctcatgccttcctcacccagcgcttcgtcatcaagtggaaggggtactcgcacctgcacaacaccgaggagacgtacgagtttctgcggacgagccgcttcaagggcttcaagcgggtcgacaactacatcaagagcgtctggacgatccagaatcggatcctgacgagctcggcaacgtcgcgcgaggacctcgaagcgttcaacattgaaaaggagcggattaatgaggtccgtcgccttgccttctcccgctcatgggcctgcccctcagttgaccatttcccctcctccttcgtgcagatctttgagtcgtacaaggttgtcgagcgggtgctcggccagcgcgatgcagcgcccgacgactcgcatccgttccaccgggtcgagtacttctgcaagtggaccaacctcgcctactcggaaaacacgtgggaatgcaccgaggatctgccacctgtcgcccaggccgagattgacgcctacctcgcgcgcgaggcctgcgagacggccccttggcgctcggccaactacaaccagggccggccggcgttcaaccgggtcaaggaggacccgccgtacatcaaggcgaccggcggcgagctcaaagacttccagctgacgggcatcaactggatgatctacctctggtcgcgcttcgagaacggcatcctcgccgacgagatgggcctcggcaagacggtccagtcggtcgccttcctcagctggctcttccacgaggttgagcagtttggcccgttcctcgtcgtcgtcccgctctcgacgatgccagcctggcagacgaccttcaagcagtgggcgcccgacatgaacgtcatctgctacatgggcaccggcaagagccgcgaggtcatccggacgcacgagtttggctcggcccgcaagcttaaattcaacgtcctgctgacgacgtacgagttcatcctcaaggacaaggccgacctcggcagcatcaagtggcaggcgctgatggtcgacgaggtgcgtccctggtcgctgcctgcgagagcggcagccgcagcctgctgaccctcccttcctcccatcgcacaggcccaccgtctcaaaaactcggagtcgcagctctatgaggcgctcatgcagttttctacggcctcgcgcatgctcatcacgggcacgccgctccagaacaacgtcaaggagcttctcgcgctcctccactttctgatgccgtcgaaatttggcctcaccgacgacttcacgctcaacgacgaggaccaggagcaaaagatcaaggagctccacgccaacattgagcacattatgctccgccggctcaagaaggacgtcattcagtcgctcccgtccaagtcggagcggatcctccgcgtcgaaatgtcgggcatgcagacccacttttaccgcaacatcctcaccaagaactttgccgtcctcgctcagggcgcccagggccagcagtttagcctgctcaacatcgtcatggagctcaaaaaggcgtccaaccacccattcttatttgacggcgccgaagtcggcgcggcgacaaacgacgacatcctcaagggaatcgtcatgaactcgggcaagatggtcctgctcgacaagctgctcggccggctcaagaaggacggccaccgcgtcctcatcttttcccagatggtccgcatgctcgacatcatgtccgactacatgtcgctccggggctacatccaccagcgactcgacggcaccgtgccctcggacatccggaaaaagtcgatcgagcacttcaacgcgcccgattcgcccgactttgcgttcctgctctcgacgcgcgccggcggcctcggcatcaacctcgcgacggccgacacggtcatcatgtgcgttccggccgagcgcactgtcagaggcggcagatgactgacctactctattccttgccctcgccagcttcgacagcgactggaacccgcagaacgacctccaggcgatggcgcgcgcgcaccggatcggccagaagaaccacgtcatggtctaccggctgctcagcaaggacacggtcgaggaggacgtcctcgagcgcgccaagaagaagatggtcctcgagcatgccatcatcaatcaggtcgacacgtcgggctcgtcgctcggcccgcgctcggccgccgcgcccaagcccgaaaactttagcaaggacgagctgagcgcaatcctcaagtttggcgcccaaaacatctttaaggccgacgacacggcccagggcaagaagctcgacgagatggacctcgatgacatcctcaaccgggccgaggaccacgagacgggcgtcgacgccggcgggacctcgctcggtggcgagggcttccttcagcagtttgctgccgtccaggatttcaaaaccgacctcagctgggacgagatcataccggaggaccagcgagggcagatcccgcaagggatggaggaccagaagcccggcgtccaggccgggccgtcacactctggcctgacgcccaagaagcggtcggccgcgaccgccgccggcaggtacaccgaccagatggacgccggctcgggcggcgaggacgagcactcggcctcgcccgaacgcgagcggtctgaaaaaaaggggaagggtgcgaccggcccgcgcaagacggcggcgcagcgcgcgcttgagctcaagggtgcgtccttgcctgccattcacccgccgttagccgctgaccgtgcgcccgaaaccgagcagaccgcgacctccgcaacctgatccgagcgatccagaaatggggcgacatccgacagcgctacgacgtcatcgtcagtgtcggcccgcacactgtcagctgagacgggatccgagctaacgagtgctgctctccgtttgacagatccgcgaggccaagctcgagacaaagaaccgggccgttatcctccaggcctgcgacgagctgattgcgctcggcaaggaggcgatcgaccagcacaaaaaggagctcaagggcaagaaggtggccggcgagatcgtgcgtccgctgcccttcagggcgctcccttctgctcttctggcagacgtctaacctcttctcgcctcttgcgcagatcacgtcaaacatgcggcagaaggcggtcctgatggagttccgtggcatcggcaacctcaacgccgagacgatcgtctcgcggcacttcgacctccaggcgacgcacgccgtgctcaaagaggtccacgcgcacggcaacccgatcgagtggcgcatgcccaacgaccacctccggccgacgcagaactggacggtcgactggagcccggtcgaggacgcccgcctgctcgtcggcatctggcgccacggctttggcgcgtgggaagcgatccaggcagacgagccgctcgcactccagggcaagttcttccttgacgagtccaagaacaagccgctcgaccagggccagacgcggagcacgccgacggccgttcatctcgtccgccggggcgactacctcgccggcatgatccgcgagttcgaggagaccgagaagctcgtcaaggagcagcaggcggccgcccagcgcgcccagcaggcctattatgagcagcacggccattacccgccggtggccaacgtcctgccctcggtcctgaacgctgcgccggccgaggctggcccctcctgggcgccggccgtcaaaaaggcccgcaagagcacctctgccgcgccgtctgcgtccaacaaggacaaggacaagggcaagaagcgcaagggcacgcccgtctttaccgacagcgagtccgagtccgactatgcgtcgatggacgaggccgaggccaaggaggagctccggccggtcaagtcggctctcaagcagctcaagcacggcaccgaagatctcccgcgcgaggaaaaggtcgaggtcctcaagcagtgcctcatcgtcattggcaagcggatcgaggtcgtcgtcgcgcataagacggccaagggccagaacggtgataagtgcgtcgtctgctctcgctcgctctagtccgtgtctgaccatgccgctccctccttcctgcaggtggatgaagtggctctggcactttaccagcttcttctggccgcgaaagggcatcaagcaggacaagctgcgggccatctacaccaagatgtacgtcctctcgcctcttgtgcttgggccgattggtgcggccgtgttgacccacgcttcgtccctctctcgctcttccagggctgcctcggcgaatgctgccgcgaactcaccgacctcggccccgccaccaccggtggccgcccctgccggtccggctccgccccgaccagagaccaacggcgagccggccgccaagaagctccgggtcgagccatagttatatatgatcagccgacctgcccgtcttcctctcttgttcctcctcccagcatgttctcctctgccctcttttgttttccgcctcccttgcaggctccatccgttcacctccatcccctgtaccggtccggctgtgctttccgttcaccgtgcgccatccgtcgccgaaacttggatgcaaccccccacacgttgtggcgcgtcgaccggcaggcgaggaagcaaaggacaaaatgcagatcctggagcgaaaaagggaattgaggggggagcagctatgagcgggaggggcaaggggtgaggagggccagcatctatgaggtgggaacggggtgcgtattcggtagtctatggggaggggcaggcaggcgataggagtgtccgtctgggaaggataggtgcagttgtacagttttggcggcatcactggtttgagctcatggcgagcgaaccggcacggccaggcttgacggtcgcgacagacggagagcgcgagacgcgcgacttgcctccgatctgtagataatcatcgtcgtcatcgtcttcgtcttcggcttcgtcaccgtaggcgttggcgaggcgcgacgcctgctgggtcgggcggtcggcagcgagcgtgcccggcgcgtgggcgctgctgctgacggtcgatgcgagggccgacgacgaggccgacgtcgtaagaccggcgaggccgtccgcgagctcctgcatgttgagcccgccgccggccgtccctccgcccgagccggcgctttgagaggcgcgtcggccgaccgcaaggaggttgccctcggactgggtccgctggacctgctgctccgactcgtcatagtcgggcaggccctgcgttgccgagagcggaacgacgccgccgccgaggaagccacgggaggcgacctggtaggacggcacctgcgagagggccgacatgtcgtcgaaggacgggttgcgcgacggtacgttcgagtgcaccggcgaatgcatcgccgacgagcccgccgagttgctgccgcccgagtgaggaccactgccggaaccgccgggcgtgcttacgccgctggcgccgccggtgccggtgccggtgccgtcaaacgcactgagcgagtgtaggcccttgacgtggtgctgcttgtggccatggccgagcgaggtcagcggcttgaagtgggggatgttgaagaggctgccgcggcgctcctcggcggctgcatagggcggcatctcgctcgccggacccggcggcggccgctcgcgctcgggactcgacggccggctacctggccgactgcccggtcggctgacggatcgccggaagccaaggcgactgccggagcggctctcgggcggcgtacggtgaggcgagagcgcaccctggctggcgtcagggagggtggcgccgatcgacatgagcagctccgagtcggcccagttgagccggggccgttcaggaacgggcaggccatcggctggaagtccatccgccggcacaagggcgcgcatgccaaaagtgggcgaggccggtcgcgagcccgggcgcgaggctggcggcgtcgttgctgggctgtgcatccgcgacgaccacgaggcctgcgtcgtgcctgtgcctgaggtcgaagcgatcatgccggcgttggcgacgcggtcgtagacgtggttcgagtaggacggcagctccagctgctggtcattctcggcgtcgccctggaggctgaagaggaccgcgcgcgtgtgggccgacgccatccgagcctcctcggccaggtggtgcgagaggacgtgaatcgggagcgcacaacggagctccgaagctgagagagttatcgcgaaaagggtgtcagcaggcggacgtcgaggcgactttggcaaagactgttcgacgcactgtggccgtctgggttgctgatgacacagctccacttgatcttgtgagtaacaaagaccgggtggacattatgcgtcggcgtagcccacatcggaagcgggatcgagatcatcgtgtcgacctcgccatcgccgagctcgacctcacgctgctcctcgcgtgcggcgagataggccgcctgagcctcgacgtgggtcgccgtcaccgggtcgagcccgccggcaaagatgtcaggcgcgagctgcgacgactcggacgaagtactgtttcgcgggccgttggcgctgagcgcgtctggccgcgagggcgacggcccgccgtggttggtgaactcggggaagtagccttcgccctcggccccggcaggtgtcgacgtcgaaggcgggccaaaggtcgaccgtgccgtcggcggcgggccgggcgtcgctccgcctccagggctcgcagcggccaaggcggcggcccgctcggcacgctcctcggcctcgtcccgctcgcgctggcttggccgacggacgagcggcttctcaaccttctccttgtggacgtaggccttgccgttccggatgtcgtgcttgatcgaggctgcgacacggacgtctgggtgcgacgaatgacgcgtgtggacgagcgtatactccttgacaacggtcgagatcgatgtgacgtggacgcccttcatcagcggctggaatttgatggcgatggggatgttgtcgccggcagcgaaggccttgtgtgggagcgtgagcgagtacgagaccttcatcggccacgtgttctcaatctcgagcgtctgggtgaattcgagcgcctcggccgtgaaggtccgcaggaggacgacgggcttggtagcgacaaagttgtgcgagaaggcgccggatcggacggccgtcgcccgaagcttgtaggcgacgtgggcctcgttgttccaagtccggattgaagacggcagcgtcgtgtcgggctcgagcatcatcgagaaggggaagctgtgtatgccggccttgagggcgtgggatgacgcatgcggcttcttgcctcccggcgtcggcgggaccgtcgtcgggttgaggaaggcccagtcgtgctggatgaggacgtgcgtgtggtggtgtgaccgagtcgaagagctgagccgcaagcgaggaacagccagccgggagagataaggagatcagccctctggctcagcaagggcgtctgctctgcagagcacgcggctctatgcaagagtctacagccgagatcagaagtgacgcacccagatccttcgccgaacgagaccttggccttgcccgtcagttgaagagtcacctccttgaggttggtctgctcgaccaggtgtagcaggacccgaccgctcagccgcgccgggttcgtgtcgccgccggcaccacggagaacgacatgctcggaatcgaggacgatctcgacccagctgtgcgaaacgccgcttgccgtcgggccgaggtgggagggtgtgctgaggccagagccggcggcgactgacgacgggaagttcgcatggtcaggcgtcgttgtcccgctcgcgccaggcgttcctgcgcccgaggatgcaaagtaggaggcgagcgggtcctgctcgccaaagccgttggccgagaacgagacgccgcctggcgtcccaggcgtctgcggcggcggcgggtggttcagagttgaggtgccgcccgcatgaccgtggccgtggccgccgaggagggagggaaggtgcgtgccagacgtatgggccgacagccagccgggcgtgcgaggcatcctgggcggggcggcggcagcagtggttccaggatgagacggagaggaaacggcggcaagggagggctgagctgctaggctagaatcgaagcggatcggtttcagggatggcgggcgtgagcgaaccgagccaaaaggcggtcgtatacccgtcacggcgactgacctgctgtgaggggacccttatcggacgacttgctcgaaaagtacaggagggaagggcagtgagtgggggaggcggcagcggtcgacggaacggggcaaaggcaagagcgagcaactgccgccaattcgccctgcaggcgtcttccgtctcgcgcgcatgcgtgcgcgcgcggcgggcgactgccgcctcgtcgaaggcgcggcttgctcgtcatcgttgtcgagcgaccgataagttaaagcatcgagcacccatctcgaggcgttcgacttcaccctgataaaagcgtacgcgaagccctgccgagctgccttcctctcgctcccggattcaaagagggtcgagctggatcggactagaccctcgctccctccgatcgacgaatttcgctgcacgctgcgcagccttgaccgccgcctccgggctgacccttccggcccgcaggcagactgctcgtccagcaccgccttgccatttttctccagccgtctggcacctctgacgacctattgcgatgatgcaggacgtctcgctgatcgctcgctctcgctctgaagtcccgcttcgcgccaaggccggtcgaaggcccgacatcgccctgaggcagcccttcgggcggagagggccgacgaccgcccgccggccgacgagccgcgcctccttcgccatccaacggcgcttcggtcagaagcggtgggggttccttcaacgtcggcccagctacgactacgcgctagcgtcgccgagggacgcggcaggacgtcgcattatccctcatacatctcgagggcctcaagccaggtcagcgacgggtttccgcacgcgctcccactcagcatcgtcgacctcgagctcgccggccatctgaagtcaaggcaggggtcagatcagtgtcggcccgagcgactgagacaggaggaagcgcgaggacagacctgcttcttgaactgggtcaggtcgccgtaggcggtcgcgagatggaggccgtcgatgccgtcctccttctggcggacagtgtcttgctcaaagacgacaatgccagagtaagagacccgccggccggtcggctccttacccgggaagaagcccccagcgcccgtgtgggtaccgctccagtcgactttcgccattgctacttctttcgtgccgacccgtgagtctgtcaaagggacgagacgaggaggtcagctcaggatgagatcttcctgggccatctggagcgaggcgttctaacgcacagacaaccagcgtggggttgttgatccagtccggccacgagacacgtaggccgtctgcggacgaggttaacggcggcgataggtcagcgctgagccgacagacgacatctatggagctcgaccgaccttcccggtacgccatgtaccggtctctgttgtcgatcggatacgccccatccggcaggctgccgacaaacctgcagcccagggcgcgagctcgttcagaacaagcagcgatcctcgcaaggtccagagcacgcacttgaagtctgggtgaagatggaccgggtcgagcgcgacgttggtctggatataagcctcgcaatgagctctgaactctgctcgtggcttgtaggtggtcatgacgggggacagagatgagttggctggaggaagaggaggaggagtcggcttggtggccaataagagctgccagaggggatgagaggtggaggaggttgagggctcgtcaagaggttcgttcgaagcagctgctcccgctggcgagacgcgcagcagcagcccgatatgaacgagccggcaaagcagcctcgcctcgccacctatccctctttgcttgacggaagacgacagaaattggtacgagctctccagaagctctccaagccgaggaatcaagagtaccgtttggaggatgatgcgaggacaacggaagttgagccagaccggctcgcgtcgatcgctctgctgctgccccgcgggcgagtgcgcgggccttcctccatccgttcagcccgagagcctcagcagcctgtcctcatcgctctctctccctcgatacgccgcagctcgccacactcagagcatagcgcatggcgtctcagcagatctaggtcatcacttgcccactcgccacctctagtcgtccgaccgagcgccttcccatgtcgcgggcgacgccggccgcggccggcagcagcacatctcctggccagggcagcagcagtaaagccggcgccgtcgccggcagtatttcgcagggcccgaaacgacacacgcctggtccagtctacgagctcaggccgccagactggcggccgccgacgagtgccgatgccgaccttggtgcgtcgacgtgacagacgacggccagttggccgggagccgagagctgacggaaccctccgaccctccgtctcaccctcccctttcctcgtcgctcgcaggcttccccgactttttccccaatcgaccgggctttggtcaggatgaggacaacctcagcgaggccttcatccggggcggctacgtctcaaagtggggcctgagtaacagcgtgcgttccgtcgatagcgccgagcgccctcgcccggccgggccggtctcccttccccggcacctcgtccggcacagcgctgacctcgcctttgagtcgtcttccccagtcggagacgtactcagtccacggtctggtcctccaatcgctgggcaagacccagctcaggacgctcaacgactcggtcagctcgctcctgacgagacgccaagaggagagcgccgccgtcgagtgagttctcatgtcgctcgccactcggaagtcgggtcgctgaatcctgttgcaactcgactcttcgcagtccgcacacgtacaaggttcctccccggctcgtcctccatgagacgaagaagcaggcctacatcgccgaactcgccaatccggccgtcccgctgcaccggctctcgcgctcgatcccgcacggcttcaagggcgtcgacctgctcgagatgctcgccaacaacaacatcgcgctcgaacgcgcactctggtttatcaaaggctgtggcggaagcgaactggtgcgagagccgtctcctcgagctgcgtcggggtcgagcgcgcactgactcgagctgtacccttccagctctcactccggtctgccaagtcgcagagcctccctccggccgctcagcagagtgcggccacgcaggcctcggcaacgtacacggtcgacttcaccaacgcctttgctgcctttttcaaggctcaactcgcgcagctgacggtgccatcgacgctgccgtcagtcctccgcacgtcgacgaccttctccgtcaagtcgaccttcaagtcgcctctctcggttccggccagccgtgagcgctggctcaagaagtggagctacagcaaccgcttgctgcaggtgtgccagctgccggagcacgcgctcattgatcggagggcgctgctcagctggatcgtcgctctcgtcgggaccgccaacctcgcccaggtcccctttgtcgctaagctgatcgaagagtactcgtgctggctgtactttgatggcaacctcagccgggccttcctggaagccgcactcggccggctcgctggagacctcgccggtaagaaggagctcgaggcgacggcagcccggttgtccaaggccattcagtgtctgtttctcggcgcgccgcatctgttcgtctcgccccggctctacgcgcaacatctcggtcagctcgacctgctcttgtcgacggcaacagcaggccagggcatgctgccgccgtctatcgcccgggacgatccggtcgcgcacgagatcctttcggcgatgggtgacgcctgggagtcgaccaaggcccgcaatgagggcctcttattccgtagctggggtgtcggcggtggaaagggcgtctggtcggagcgcaagggtacgctcggcgacatctggatcctcgactcggtcacggctctctcggacatggcacgcgtcaccaaagccttctttggctccctctcgcagccgccgtcggcctccacgtctgccgcatccgtcgacgctggtgccagcgctggtgccagaaacgctggctcgcccttgtcagacggcagcggctcgtcaactctccgagaggccttcgcggtcaagctcgacatcctcctctcgtgggcgacggccaagccggccttgcgctcgcgtaccgccaaagcccagcgatcgtacgccgtcgctaccatcctctcgctcttcctcgctgctcgaaccggctcgggccctcagccgacagaaggctggccggctgccgtccaggacgaggtcttcagctggatcgaagatagcgcgctcgcccgcgacgaggacaacgtcgaggtcgtcgctgacgtcgtcggcgagctcgcccgacggtcagtcatcagctacccggccttcttgatgcggctcatcgctcgaggccaaacgtggagcgccatcggccgcagcgtcgagctggtgcgtcgccctcctaaccttgcttcaggcctacctcgggtcgctgacagcacttttccgaacgctagggtcagtctatccctcatcagcttcggctcctccgctcgatgccgctcttcgcgtcgtcgcagtcgatccggcatcagcgccatgtcgtcctgcacggtgacgccgcgcattcgccttgtcctccagcatgggacaccgcgggcttactcgagtcgagccagggtgagctgattgccgcatttcccgagattctgctcggcttccacttcgaaggttggtcaccctgctcgcagccttttggccgacacctgcggcaactgatacgctcatctgacccttccgtccagacgagtcgttctcgcggagcatgacctcgcttgagagcacctccttcgagacgacgctcccgacgctgctgcaggcgccgcgatccgttcaggtcgaggcggtcagcaccgtcttgttcagcgccatcctctcgtcagagtacgtcgctgcttgctgatgtcgctcgtcgcgagtcacaaagattgatcctcacgcctcctgccagctcgccgtttctcaagtcggctctcttgattcgcgtcattgagctcctcgagcgtctcagcaactacactgcggccctcgaagtgagcttcgcaccctgctcttctatgtctcagcggttcatactgacacgctcggtcttctgctcgaactcgccgcagatcatcatcctcatcctcgagtcgtcgcccgacgccagcattcttaacgtcaccattgactgcatcaagcgttgcaccgaaatctggacggcgatggacgtcaaggctcgactagtcgaagctctgcttgagcggtacctcgtctctcgctcgacggcaaccccgctcaggcccctgctcgagctcctgctgcaagcggcagatgctggcctgctgcacaaggagctcaagctcgccctccttcaagaccaggctgtgtttcagatggaccaggtcagccacttcccttcgactcacacctcctttgtctttggctgacccttgtctgtcttgattagaccgccttgtcgctcatctttggcaacgtcgccccatcacctggtccgaccgaggacatgctcgccccggcagccggcgcttcgaccgagtcggccgagggctcgatgggcaaggagctctggggccgttacgtcgatgcgagcgacctgctcaagtatctgacgagagctggctatgagaagcacatcctttcagacgaggccgagctcgtcagcgaagcgctcaagggccttgaaggccgcccatcggagaaggtcggttcgcacatttcaaacgctcctcgcgacaagagctgacgaatggctgctcttgacttgctcacagttcgtcgcgaccgccacgcagcgactagcggcttcactggagcgagccgccatctcgccgtcgagtggtcaggcacagctcgaccgcttcgtcgaggagatcaacggcgtcctccagatcgtcgcctttgcgctcgcccaggctaagccttcgagtgcgacgtctcctccaacgccgaccgacgtcatgtgcgacaagcgttacgcaccggctttgctcaagacgctcgaggccttccgagcaatggcggccttgtcgggctcgggtgaccagagtcggtacccgccaggccaggcacctatccacggcctgcggtggacccttgtcgtctgcctgcgcctgctacacgtcctcctcggcctcgctcgctacaacatcgcccaagtttggacggccgagacaaaggggctcgtcgacgggctcctgaccgtcctgttgcggcttgccgttgttcgtcgactgccgcagtccaccctcgtactctgcgaccttcgtgctgattgcctgccgccgacctgccagatccacgccggtaccgtcacgctcgacagagagctctttgacctgctcatggactcgctctgggcgttgacggagggtacgttaaagcgccgtttgcccgaggttgtcagtcagggcctcgaacgctgacctaccgcgtccgctgtatcttccagacctcacgaaggacgcaaaggtctcggccgccacagctcttcgaatctttcagacgaccgagaaccctcagcagcagcgcggcatccctgaagacctcggtgcacagctcgccgcctttctcccagccatcgcctcaccgacctacggctcggacctgctgctggttacgccgcagccgggcgacggtggtgcattgacgcccgctttcgagcgcttgccgactcgtccctgggagtggaacgagcagatcgaagctctggcgcctgcgccatcgcatcgcgagtccttcctgcctctgcagccggttcgcaacacggcatcgctctcgttcgccctctttcaggccgagggctctcgggaacgcctgccagcgccctcgacaagcgcatggttcccaccgccggcaagtgcgtcttcagcgaccgagcagacggcgatctcctcgaccgacggcggctgggtcgccattagtagcgagcagacatacacggacgagctcgagagtttgtcctttgcacgcgaccacttcagcagtctgaccgtcgtcgctcaagcagcgctcgatgggccactgccaacccagcgggccagttcgaccagtggcccttcggtcagcaaggcacccacgccaacgccgtcggccgccggaccggctgcggccaaggcatcgaccaagccggccaagcctattaagcgcaaggcatcaatgtcgctcgcctccgccccgcctggccagcgactgaaggggtcttctgcggccgacgcggtcgtcctcgacggggctgaccaggtgcccgagccggctacgagcagccgcaaggccggcaagactgtcgccgcaaagcctgccgctgggagccaggcaaagggcgccggcctaaaaaagcgcaagaactctgcggcttaggagttctcggggcgtaggagaggggagacagctgtcgcgagtcgcactaaccttcacgattgaatgacctcacgatcatggccataactaagaagcacaagcgccgctggaccttgagcttagtcggccttccgggcccaccgcttggcagggacaatgccaaccgggcttgcgggcacgccgacgttcttctcctcgagctcgccgttctcgctcacccgccggcggacgtcgccaggcaggctgggcgagagcgggctctcagaggcatagctcgcggcctcatcggcctgaactgcggccagccgggccggtcgagacggcgtgccggctttgatgttgcctccgagcgactgggtcgaaggactggtgccgacggcgggggcgttgttccagtaggcgatcatctggaagacgatgacggcattgaggacggcggcgaggatgaagccccataggacgaccgaatccttgacctcggtcgccgtcgtaaagacgcgggcgaggcagccgagcagggcgttgaagacggcgaaggccgagagcgtgcccgtcgacttgagccggtgattcgagacaatctgtggcgccttggaaaggagcgaaatgggcacgcacgccgcctgaaggaatgtcactgtgagaggacgggtcaagctcgtcaggtcggcatgctgaacagcgccgccgggcttcctccgcgcggacgtactagctccggcggggatgatgcgcttgctaaagagtgagccaccgatgacggccatgccgacacccatcgcgagtaccttgctgcggcgagcagccgcctccttgctccgaccagcggtgctgatgctaccggcgccgccgacgccgtagtagatgatctgcagcgtgatggcgacattctggatcgtcactgggcaaagcgcacgagaattacaccgtcagctctgtcagcatcatgagcggcttctgtcgcccagaacgatgcccgtctcgcaaaacgcactgaagaagttctcgccgtaggtcgagaacggaaaggacgaccggtaggcgtaggcgagcgagatggcgtacgagagcgtctccagcacgtaggccggcagcgagaggccgattgccgaacgcgcctggctgatcttgatgatctgcgggtgcggagagagcgaacggagcatgagcaggtgagcagacggtgtctcgctcgtgtcggccggctgcggtcggaaggggaacacacctgagggatcttgacgatggctccgccaaggacgatgccgagaccgaggcccttggaaagggcgaacttgaggcagggtccgtcaaagatgtcaaagtcgtagatgagcgtcttgtaacatgtctggagggaagcgacgatgggcagggcaggtcagcaaagggtcgtcgtcgtcgtcgtcgtcgtcgggagccggcgagtagctctgccagcgccagcaaggtcggctgatgaacgtacctcgccaatgatggcctcggctggcgcacggaggacccaaggtatgcggtgcgtgaccgtcgtaacgagggaagacatcctgaacggcagagagaagttgagcagacggtcggttgggaggcttgagacttgaagggtcgggtcgcaacgccgggagaggcaggcaagcagccagtcagtccgggctagtgatctcataccagactggcagcctgaccgctcagcgtggactgagggcaaagaagctcacaggggagaagcggcctggatgtgttgcgcttctagcctgcgaaggagagatgctggttggagacggctgctgtcgagcttctgcgcgcgcggaggcctcgacatcgcgaaaagccgcagcggggccgtacgttttggtgtgcactcgccctcctctccgccagccggactagaaagtgtcatgcgagggcacgagaggccagacggagcagatgtcgttgagaggcattccatcattccggatcgcgggcaacagtctcgctctctgcagcaattgcagaggaacgacgaggccgccgaaaggctggctaagttcctccctgcgctcctggtgcgagctcgtcttgaaggcgcccgtggaacgggcaggaccagcgtatcggcggcggtcgccttgaggcggaggctagaagccgacgcccggccgtcgattgcgagccttgcgtgcgactggcgaggctgcgctccgccgccaatgagctcgggcgaaggcgagggatgcaacctacccagcggccggtccttcaagagcgaggactgcagaggcaggtggcctggccgaggaccactctcctctatgaacgagcttagcgcgactcgtcctcatcctcttcaccgccgagctccatcttgcccatgaacaccgcgacgtcctctggcctgcactcgcccgcgtcgactgcgccgagggcccggccgagggcgatcgtctgccggattgtcgagccgcgaagccagaggacgccgttagtgccgacggccgtctcgaaggggaagagggctgcagccgaagcgaagagcgggtagtcggggccgagcaggctgccgtcggccgcgagcagataggagtcagtcaagtcactcggcttgcgcaaaggcaatgcctggagactcacgaccgggccatctggagcgagcacgagacgagcataccgccgtccttgagctcgcccaaaccctcggccttgcggctctcagccgcaaagcactcgagctcaggctccatgtcgcggttcgcgagcgagacgcgagcgtagacgacggtgccgacctgtgagtaaggtcagagggagagagtcaggtactgcggccaggcgcagggacggcggggcgtcgcaccttgaggttcggccggttgcgcttcgtcgcattttcgaaagcgagagcgtcaagcgaggccatgtgggcgccacctatatcgacgcggtagccctcgccgtgccgggcgacgatggtgccgacgaccgactcctgagcggcgggcacgtactgagaagagggcaagtagaagccttgtcagccctcagcagcagcaggtcgactctcgtgcaacagcgccgagaagccagacgcacgcgcttgccacgaccctccacccacatgcgctttcctttgctgtcggacccgacaaggccggccctggtcgcgatcaggagggcaccgctgccgctcgagctggccgatgctgccgctggcgggcctgagcgagccgatgtctgaagcgtgcctgggccgagcttggtgagcgcgcccttagcgggaaggacgtcgccaggaagaaggaggagcgagctcatcgttgtcgtctgatgaggaggagagagaatgaggtgaagcgggtcgtcgtgtcggtcagagcgagtctaggctggctggctctggccctgcgccctgccctgtgccctgcacacccagcgccgcaggagagttgcgcccccgccgcccattttcgcgcgggcgcgggcgcgggacggcgtgcagcatccaacgcccaccatcatccgccctcgtctctacttccctcccttctaacagactcccatccacgatggccggacccaagaagacctcttcaaagtccgccaaggtgcatcctccatcacgggctcggtcgcagacagtcttgcctctgcaggaggccggccggccgcttccgatctctgccgggcgagcagacacgcgcgcgcgctctcccgacgcgtctctctgctccagggctgagccgcttatcccgaccctattctcggtacgcaggtctcgacggccgagttcaagattgggtcgaccgtcctgtgcaagatcaagggctacccgttctggcccggcaaggcgagtccctaccctcctgactggtcaagcgggggtgcgagagcttgcgcgcgcgcgatgggcgagacgcggctctccctcgtgcagagagctcgtgcccgcccgtctctttgctcgcatccgggctcatcgcgcctgccctgaggcctgccgctttcgtttggctacccggctgacgtcctgctcgtctttccttcggtggatggtctgcccgtccgctaggtcgtcgacctaaaggacgtcggggccgacgtcgtcaaggagaagccccagaggggcgactacttctgcgttcgcttctaccccaagggcgacttgtcagtccctcctcgcttaggaggctcctcatggaccacgggcagaccgctgacgccctttcgtttcgctttctcaaacctccttccgccgccacgtccatccgccgcgtccctcccgccggcccttttttcacctgccgccccggctctccggtccctcgccactcgcctcgctcgaccccctcgcacatccttcttccaatctgtggcacacccatccggctcatcctatccgcccactttccgccactttccgccattttccgtgttcgccgaccgacccgctgctcggcccacgcttggtcccaattgcgccgcgctcgctcgcccactccgcgctgcttcgccacagcgcctgggcccggcctagcgagtgcaaggctcttccgaccgaggacatccgggccttcatcgacgagccccaccgcaagtcgggcgagatgctcgagggctacaagatcgcgctcgacccgtcgtcgtgggaggccgagctcgccgaggccaagcgcgcgcacgacgaagcgatggagggcgtcgacgagctcgaggacgacgaggatggcgaggacgaggtcgggaccgcctcgggtgcaaagaagcgtaaaaagacggccgcgccggcaaaggacgccaagggcaagaaggctaaggtcgagaagaaggccaaggtgcgttcaagggtcgctcgccgagggcccaacgccctggagcatgacggctgattctccttcatctcaccttggtcccccaggcgcctgcctcgaagaagggctcgaaggtcaagtcgaaccccaacatcgagtcggaggaggaggccgagccggagaaggcaaagagctcggccaagaaggcggcggatggtgcgtcccagcaactttggacctttccttcccgccgtcaaactgacctggcccgcctctgcttcacgtcactacagaccttgatgccgagtgcgtgcgattccggtctgagccaggctcacgcggcaagcgctgacagtctccgctgccctcatctgccgcctccctgcagctcggctaaggtcaaggactggcggcacaagctccagcgcgctttcctcggcaaggccccgcccgctgtgcgttgcgcttgtcgtcgtgcgagcgcctgccttctgcagccagagtgctgacctagccacttcgacctctcgcaggagaaggacatgccgaactgcgaccagtacttcacgacgatcgaggcctacgacgacatgaccatcgagcagcttcaggtgcgtctgcagaggaggcgaggcgacagcattgggcgactcctgacgacgaattctgtcttcttttcaggcttccaagatcggcaaggtcatgcgcaagatccaggcgctcgaatcgatcccccgggacgaggacttccatttcaaggagcgggccaaaaagctcatggacaagtggcaggcccagctgaacaaggcaggcgcgaccgaggattcggcgccggcgccggcgaacggcaacggcgcgtcgacgtcggccgccgagtcgaagaaggacgaggcttcgccggcggccgccgccaaggaggaggaggcgcctgcgcctgccgcccctgaagaggaggagaagaaggaggaggaggctgcgccggcgccggaggctgagatggaggccgaggccgcccctacccctgctgccgaggaggagaagaaggaggaggaggaggcccctgctgccgcccctgctgaggatcaggccaaaaagacggacgacgtcgagatggccgagccatcgacgaccgacgagaccgccgccccggctgccgaggccaatgccgccgccgccgacgccccggcagcgtagggaagagacatccggaccgcatttcaaccccctctgctgcatctctttaactctcccccagccttgctgctcgtgtctcgtccttgccccggccgcgggtttcctgctccctatcggcctctttgaccctgtatactcgtaccctccttcctccgcctctttcgcccttttcccctccttcaccctttgcgccctgtcttcgctcgccttcccctccatctttccctttttccctctctgcctcatcatggcccctaatggtctgtccgcgaacacttgtgaagagcgtgaagagagtccgtcattgccatcttgctcgagcaagagctcggccctcagcagacatctctaacgcagccactctagaccgccgccttcttgcgaagcaccgagccgagccggctcaggcgcgattctgtccgctgcttcggcgagggtaccgttgatgacgacgacgaagccctcactttcgaatgccggggctcgacccgagcgacgggcgagtagtgcagcggtcggtcgactggccctggcgtcggcgtcgaccgcgcgtcggccgccgggctgaccgagtaggccgagaattgtgagacggaccgggcgtcgtgcgccagggtcgaaggtccgtctcttgtcgcaaaacggtcgtcgcggaacgatggagagatatgggtgtcgtcgtcaacgatggacgtgccgcgattcagctcgctggtcgccgagatgctcggtttgcggacgtcgtcgacactgctcttgagcgaggcgggcgcgttgaagccattcgcgcggtgtagcgacgatccctgcgagggctgagccgcggccggactctggtgcagctcagcctctgctagatgcagtcgggcaatctcctccgcaaagttgcgcgagaagactggcgagaacgggtcagatcatggttttagtcggtctctcggggaaagcaaacgtacactgctgaatggtgatgtgaaacggccaaagcgactcggggcagagcgccgcgtggatggcgaggcagcggtgaatcgcaagggtctgtagacgcggtggtgtgtcagcagctcgctgagatcatgagtgcgagacgagcggatggacagacgtggagatcgattgagatacggatctcttcgacgaggtcggtgtcttccggatgagcctcgagaaagctcggggtgaagaaagccttgcggtacgcagggatacctccgtgccgagggctgtcgacagcggcgttgagcgccatactcagcgagttcgtatcgacctcctcgccagagtcggccagctgcaggaacctcttctccaggacctgaggaggagcgccttcagagatcagtcacaccggtcagactggtctgttcaggctggagcgtttgtcgcacgtcgagctcctgcgtcttgatctggacgtcgtgaatggcgttctcgagccctgtaatctcgacggttcgcgtttggatgacttcactgcggcggatgagggccggcagcgcctcttccgtcgtgtagtacgtctgccagacccgagatgataagagcgtcagctgtagagtgcgagcgacgcaagacaagagcacgcacgcgttcgaggtaagcgtcggcagcgtcaaggtctccgcccggcggcacaccgcttttgctgaaggacctcgagtgcgagaagtggttgacgttgctgctcgcaccgtccgagcaggagaagaaggtcagcaggaggcatcgcagacccgactcggcagctcgcgcgcgcacctcgtctcgtggtagaaccggatctcatgcggtacgtcggctcggaagactggcttggagcggtctggctcaggcacgaccggcaggacctggatgcaaagctccgagcctgagcgcaggtcctcgggtacgctgtcggtcgtcagcagtcgtgccgtcgggtgcgtcgtctgcagcctgtcgacaaagccgcgcagcttctcccagtcggcgccccggtagacaaagcaccgattgcggacggcgagcgggaaggggccaaagtaggcgatgaggaagtagtgcgtgaccggccgaggctccaacatgatcgactcggagagtcgcgagtggtgcgagaggagttcggcgagacggagactgagaagagagcacgtcgtcagctcaagtcaagagaagcggatcaaaggcgtgtaggtcgcactagtcgaaggtgacgttggcgtgctgatactccagctccttgcaagtctcgattgcgagctcaaaagacttgccacgacctgcagcaagaggagaggccatcagcgaggattgggacgggctgtgcaggagcaagacaactcgccgaggtagtccagcgtctgcaaaagcagggcctccttccgcgcgaattgcgactgtcgcggtaaaacgagctcgccgagcgcaagcggctcgacgtagacgtcggtccgccaggcgtagagcgcggcgtgcatcttgagcgtgagaccggcctcggtgtagtcgccgctgagaacgtgtgcgtcgacgagctgatggacatattggataactgcgcgagaggcaagcggccagtcagccaacctcacaagcctttgcgaacgctcgatctgcgacgaacacatttcgtctcgaccgccgatccggcggataaagttgagcagccgcagtgtgccgaccgtccgatcgtcctgaaactggttgccctccgggaggtcgcgcaggccgagtagcagatccagaaagcggtcgaccgagtcgagaaaatcgtcgatggcctggcggaggagcgggtcgactgaggaaccagcaaacatgccgcggagactcgtgacgaagtaaacccgggcgagatcatcgccctctccgccatgcataaagaggaggtcgagcttgtccatgacctccgtcttgacctgttcgacgggcagtgagagggacggtcagcccgtcgcgccgctcaggcggcatgaaacagcgcgttgcggcgtacctcgtcaaagttgccgtgagcctcccattgcgacacgatcatcgactgtgacgggaaacaggcatggttagtgagaaaggcgccaacgagtcaccgacgaacctccgactgacgcagagaatgtcgacggcctcggtccgcaggtggtcgtgatggctgaggcagagcgtgaggacgtgctggacgtaaccaagaaagcgtgactggtgtcggccatgggaggcgagatgaccgctggccgacccgagttcgcccagcgcttgccaaaggatcttgagggtcgatgcgccctcgcctcggatatcgcccgcaaggcgccaaatggcgcgccgtttctagtcggaggaattggatcagttggcagtgcgaagaggcgcacgcgggcctcagaggcgactgacctgcggaccgaaagactcgatgaccacctggtcagagctgaggagcaggaagtgcgtctcgaggcaggcattccacagagagaggtcaagtgcggccgtcgaatttggcaggttgagcgatgtcatcatcgacgagaggagccagaggcacttcaggatggccgtgtgggctagcaggctgacgttgagccaactgcgcgggaacgcttcgtagcgcaggatggaggacgatgcgttgaacagtgcgagcagcgttcgattgaggttggtggcgccctcgacctctagctgctcgtcgaggaaggccttgatgccatcggtgggttggacgacgagcaagacgagaatgacggcagcgatttcgccgagcgtattgttgtgcgcagcggaaggccggaggttgtcatccgcagctgtctgagctggaggtgcgatcagaggcgaaggcgaggtggccggaaagacgacggggctcgcacggacgacgatcgcggtcgcctgatgctgatcgatggcctccaaggtcgaccggctgcgaagctcgtgatagctctcgaggagtctacaagtcgcagcaagcgttagtcgaagacttcctgcacgagagggacggaagtgatgctgacttaggtaggcacgagaagacgaggtcaatattctccttctcttgcagcatcgccctccgcgactgcttcgcagccaggacgacaaactcggatagcttgtcgagcatgacggccaggactgtgacggccaaacgaagggtctcgacccagacgacgagcgccgcctccgtccccgacacaggcgcgtcgacgtcgggcagacgctggccgaggaagggcttgatccagcggacgagcgacggcacgagcgacgccctggcagtggcgtcgtcaaaggcaatgctccgcgccgtctggagatgcagcagcagcttccagacgaccgtcttgccgtgaccaggaggtgccgcgtccgagaaggagatgacgatttccgacaactcggcggcgtcgaagatggacgcgaggtcagggaggatgtcagagaagtgctggagggcgatcgtctgcgttccgatgatggagcttggctcgctcagccgcatcaaatcgatgaagtcgcgaaggagcactgcaagtgcaagccttcctgatcagtgcgagggctgggttgggagcggagagagacgcacgatcgagtccggtcttgaaagctgcttcgaggtgctcggtcaggcgctcagacgtcccgcctatagacgagtccttctccttctgcagctctcgcgagcgcgagatggagcggaagacgtagtgcctgagaaagggagagggggtggttagcagcggcagccaagtgagctaagcgagagaacccgtcagacgtaccagaccttgatcgccgcccgaagctgctggcttgtcttgtcggccagcaggcgactcatgcagcggatgagctgacgccagaccgaggcaaaggcaaagtgctggtcaatgtagatattgaggacgggcttgaagttagtgaagcgccggtcctggacgatgctgaggacagagacgatagcgtcaaagacgagggcctcgacggtgacgtttgggctgtcagtcgcgttggcgacgaggaggccgaagagggcgtcaaagacgtccttgaggaccttgcagatctcaacctcggagacgaaagcaaagctccgcaggacggccgtcagcgccgcctggtcctggctgaggccgttgctttcccagccaagcagccggacgagcacctcggactgggtcagagaggtcgagcagaggaaggttcggacggcaagcgagtcgcgcgtcggagcgagcagtcggtcgaggtcggccgggatcgcaatgtcgtcggccgtcgcgccagctggcaggaccgaagggagaccgaagtattgcgccggtgtgatggtgttgagcctgtctgcacggtagacgacgagactgtggtcgccgtccggcagaaagacgtcgctgcccgagacactcagtggaaggtagctgaatgcaaagggccgctcgaggggctcggtgccggtgccagtgccgcgctcgcgaagtgggtggcgctggcggtagctgatgaacaggtgagagtctttgaggacggccgggtcgagccccgagatcttaatgagctcgccaaaggtcggcgtcgttgccttggcgaagacgagcgaatggaactcggccgttggaggctcgtgcgctccgcgcgagatggtccggtcgattgcaacgccaccctgctgcttgcggacctcgaccgtgacctgaaaaacgccgccgctcacctgcgagccgacgccgagtgccgcttttcgagctcgggcgccgccactgccgctgctatgcgcattgacaaagtcgccggcccacagcttgatgtacaggtcgttccttgtttgaccagggaagacgacgtcggggaagccgagcgggtctgtcggcgggcactggtccaggagtgtcgggtgctccttggtgagggcgaatggttggccgaagaaggccttcacgtcgacggcgacgctattggccctcggcgagcggccgaagaactcgctccggccttcgatgatgtcctcatgcaggctggcaaagcctgcctcatcgttcggaacgtagatctgcaggccgaggctccgagccttgtccgagctagagccggaggccgagttcatgactttcgtaacgtcaatgacggcgcagccaaaaggtcggcggaaaggcgcgaggagaccctggttgatcggctgcggcgtgtagtcgggagtgccgataacggacgatctgacgctgcctgatggcgaggatccgactgctgtgctgccgacctcagtcatcttaaggccgccgacgcggacgatcttgcagacgagggcgacgccgccgagctcctgggcgccgaggtccctgaagagcgtccgggcgcggcgaagcggatcgtgggccggcgtgccatggtgattcatgacaacgagaaactcctccgagatgaattgtttcgtcgtcatcgagtagagcgagaaggcgagctcggccgtttcgcccgcgaggcacgggttggcgacaaaggcgcgcaactcgaggaagaggtggtggaagtcgccgcccggagctggctcgtctgcgacagccggtgccgggacgcccttctttggcgtaccgaagcggccgaggctgacggttgactgcgagccggttggccggtgatagattcgaggatcagaaggcacggttttggggccctggaggtcagagagggcgcttcggctgttgaagccgtgcgtaggtgagttgatgtaggccgaggcctgtgaggatcgcgcgttaatcagtcgggcggcgcgacgtcgacatcagcgctgctcgcgggccgactcacgacctgcatagcgtacatgcgtatgccgctgacgaacggcttgacatcgacgtctcccggatcagcgtcgcccccggccaccgtgacgagcgcgcccgtattcggatgccggacaatgacatcgaggccttggctgacgttgcccttgacgagccgggcaacacactcgcggcgcacgtcgacgagctcctcgcctccgagcgtctgctggatcagctgccgccgggcgagatggagcgcggcgatgtcgtcgcggacgcgggtgaacaaggcgtactcgcccttgagcaggtggccgaagagacggaggtgccattcgcgcagtgcgcaggcgatctcgtcgaccagtggctcccgcgccccgcccgccgtctcgtctccagccttgagggaaggtatcggcggcggcagcttctcacgcggcgtgcggctgggcgtgcttgatgcgccagatggcagcgccgtcgccgagccgatgtcttccaccgccgacgtcaaatgcaagtcctcctcctcgtcttctcgcagagcttcgagcggtgccttgcctcgtccagctccgctgccgtagcggctctcatccgcgcggcgcgactcttcgagctcgcgccatgtcgcgccgagccggccttcggcgtcatcgagctcctcgcgaatgtaaacgaacgcggcagggaagatgccaaggaatatggacggctcggccggcttaccgatgacgctggtgctcgcagccactactgagccgcttgataaatcggctgagatagagggcacggccggcgtccgcgaggtcgagacgacgtagccgcgcagccacatgttgcgctcgccgccgtgccgcggggcgtagcgctcgaacgcgtagatctcgtcgccgacctcgaggtcgaccatgagctgctcggcatgggcctcagcggtttcaacctctgctaggcgtgagctgacagcgtgccgcgtgctcgaggtagccgcgctctggctggcgtacgtcgacggcgagaacggatgctgccggacgcgatggcggtgagagtcagcaatgagctcgccatccagcaggaccgcctgggcgcctccgcgcttacgagagcgaagccgtagaagatctaaggcagaagaaagcagcggcatcagtgtcgtcgtagcaagtagcgcgaggcgggtcgcgatgcctggcgggggcggcgcagcgacggacggaccttggggagcggctgccaggtatcggaccctcgctcggcgcttcagtcgaacgagcagcaatgtcagtctgaaacctctgctgcgagaatccatcctgccgaatcacgcacgccatggcgagggaaacggcagccgagggcctgttgtgatggccttcaagtcagggcgagcggcgagagctgggctgcgacgacagcggcgagtgcgaaggtatccgccgtatcagagacagtcgccggcgcttgatctcctcggatggatgcctgcctctgcggtcgagcgattctgtcggcggaaaggagctggatcgagggtctgagagagtggcacctgcaggaggctccctcgcacgcgacgacctgacccgccgacccgggcgggggaggcgtgggccgttcggagctcggaggcagaaacttcaacgcggcgggcgcagaccgacgtcccgacctcctccctggcgttgcagaccggcgcagctccctcatcccactcttacctctaacctccccgccatgtcgtcgctcatcagcgcgctcgcctgggtccgccagggcgccagccagcggcatccgacccggtacgaccttctcgaccccaatgagctcgcccgcgtctcggccctcgcccgggtcgagctcgaggacgcaaaggcccagctcgaggcggccgagggccgcaacatcgtcatgggcgaggatggcgaggacaacgctgctgttaagggcgaggattgggaaacgtacgtcctttgcgtgtttggattctgcctgttgcccgccctgagcgctgacgccggccctctcactgcagcgactctgaggacgagaagtcggagggcgccgacgacagcatggccgttgacgagcccaaggcgccggcaaacccgtccgacctctcagcctacaatctcgacaactacgacgaggaggacaccaaggcagacggtgcgtcgagccagtctgctgcccgtggctgatggataatccctgccggcacggaggctaacagcctcacccttgcgccttcttgtcttctaggcgtcttcagtaacatcaagggcctgacgtactaccgcaacgccgaggatgacccctacgtcaccttcaaggaggtctgttcaaacttgactggccctggcgcagaccttgtgctgacccgctgactcaatggacgcaggacgaggccgagctcgagcgcgaggagctcgagattctgccgaccgacaacctcctcatcacggccaagacggaggacgacgtctcgcagctcgagatccacgtctacgacgagaacgaggagaacctctacgttcaccacgacctgatgctgccttcgttcccgctctgcctcgagtggctcgacttcccgccgggctacaacccggatgcgccctcggacggcagcgccgccgccgggccgtccaagacgcacggcagctacattgccgtcggcacctttgagccagagattgagatctggtcgctcgaccaggtcgacggcctctacccggacgctctgctcggtcggcccgacaagtcggcggcccacgtccctacgccgtctggcacgggcaagaaaaagaagcgcgtgctgaaggagcgggcgacctcgtccgaatatcacgtcgacgccgtgctcggcctcgcttggaatcggtcgcaccggtcgctgctggcgtcggcctcggccgacaagacagtcaagctgtgggacctcagccggccgtcgacctcgccggccgtgcgctcgtttgacctgcacaccgacaaggtccaggctgtcgagtggagcatggtcgagccaacggtgctcctgaccggctcgtacgaccggacggtccgcatgtgggacacgcggacgcccaaggccggcgtcggcgcaatgctctcggacgacgtcgaggctgtccgttgggacccgttcgagggccacggcttctacgtcgcgctcgagtcgggtctcgtcctcaactatgatgcccggacgctttcgtcctttggcgcgctcaagaaggcgacccagacgccggccaagtttacgctcgccgcccacgagggggcggcctcgtcgctcgacgtctcgcctcatgttcgtggctgcatcgccacgggaggaaccgacaaaatggtcaaggtctggaacatcgacgaggaggacaccaacaagcgccaggtctcgatggtcacgagccgcgacgttggagtcgtacgtcgcccgcccactgcgcacagacgttagccaattactgacgaccttgctgctgctcctgctttttccagggcaaggtctttgcgctgtcgttctcgccagacacgccgctcacgctcgccgccgcaggttcggcggccaagcttcaggtctgggacctcgctgccaacgctggcgtccgcaaggcctttggcccccgtctgcgccaggctggacgcgagttccgcgagcgcaaggaaggccaggcaaacggtggcatcatcggcatcgccgacgacgacgaggacagcgacgacgagggacccgccggcggagggatggaaatggactgagcccgggtctgatttacatgccatcgccaatccaaagtctgtgtcagcacgatcaagagcccaccttgcctgcgttccggctgctggactcagctggatgtagcaaggtgcgagggctgtcgctctcgctgcgtcggtttcgggcgggcgcgcagcttcaaggcgagacgtcaccgacgagttcagccgcaaacccatgatcctcgccttcggcctgaacacgagctcgacgcttacaacgagccccgagcctttccttgcaaccctccgcgatgtctcgtcggagctcgccgtggacaccatttgctggactggctggggaggaagtgtcggtccgttcgggcggccgagtggtcgcacctgctctcctgctcctctttgcctgatgcccgtccttctcgcccacttcgcaacaggcctcggcaagctaggccatgtaatctggggctttgctccctcggcactccacccggatccgtgcccgctgccccccacgactgtcaacctgacgagccgaccacgagccttcgtcggcagcgagagccttgaggccgtcgtcgacgaggccggacgcctgcacgtgccagacgaggcatccagatgctggttagtcgcaccaggcggtgataagggcggctggctcgatgtccagcagctcatgacgggcgagctgctcggtctgcatggtacgtcctcgcagtcgcgtctcacgagctttgagacccgtctgcctgcagacccgcctctgaacgcccgttgctgtcggctttcccttgaactagcaaacgatccgtcaagcgttgttcgagcagcatccatcctggcgctccatgacaagatccccgcccgccgcgaggtatcgacagctacgccgaacttctgtcgagtagtcgccggcgcctcccacgcgctgctcgtgccatccgcgccgcatcttcatccaccgcacgcggtcgggtccaacctgcactcgcagctcgcccagccgctcagcgcaacactcgtcgaagatcccgtcgcgatcgaacttcttgaaggcctcgggcagctcgaggtccgggccgccggcgtctacagtctcgcgctgaccgaggctggcgaggtctacgtctggggcgggcgattcggcctcccggacgaggcgctggacctctctgcgttgagtgggccgggcgagggagagagtgttgagccgccgcacgtcattgcggcttcggtcgggtcaaccggagccatcatgcttggcctgtcggacggaagggttgtcgccaccggcgtcgaggaggacgagctcgtgccgacccagccggtcgatggtgtgtcggcacggtcaacaagcaggaccgacgacggatgccttcagtggaaggtgctgcgcggcaaggatagaggcaggaggctgagagttattgtcgtcgcgagcggcgggcggggctggttcctcgtcttcgattgaggaagtccttcggtttgtcggtcggtcgctctttgagggcagccggtgactttagctcatgtgctcgacttcgccgccgccgcctttgccaccgatgctttgtacagcttgagcgcctcgggtagcagccgctcaatgttctgcgtcaggccgagggtagcgtcagcccggatgcaagcatgaagcagcaaagccgaggcaaatcagcgcacctgctgacgctcgacgccgagcgggtgggtccgcatcaactcaaggttgtcgacaaacgaggtcgccttccgctggccagaagcgacggcgtcatgctcgacggcgtccatcaactcccagagcgcataggccgcgcgcgggtcgtactgcagacggcgagccgcgtcacgtcagcatcggggagggcaagacagtttccgtgtggaccatcacctgagcgcgcgacatcagctgcaggagaagggaaaaggtggattagcggtgagtcgtcttgagcgaaagtcaagcggctggtcagtcacgaaccaaaagtccgacctcgtctgcctccatctcgagcttgcgcgagtacgcccgcttggcgacgacgtcgttgatgtagttgatcgcgagagcaacgccgtcggtcacgctaagggagaaagcaggtggtcagtcttggtgcatcgggccttccttgtgcggatcgcctgcttacaccgggaacgaaagcgtcaaggcgtaggtgacgccccggacgacgtcgaagaggacggtcgcgacgttcaggaagcccatctgtgtcgaggcagtggaggtcagagccgggtcacagtcctggctcgaagttaagctggacgtacattctcgacggcgtgtcgctcgatcgcgtgcgccacctcgtgcccgagcaccgcagcgagcaagtcgtcgtcctcgaggagatcgaccaggcccgagtagacaaagatctgcttcgtcggaagcgcgagcgcgttgatctcgggctggtgggtcggaggagccatcagcccagtgagcggaatcgtcgaaggaagcgacggcgccgctgacgcaccgactcgacgaggtagaccttccagccgcggacctcgatgacgttgtccggctcgtcctcctcatcctcgagctgctcgcgcatctgccgctgctttcgccggcgagcccgccgtgagagggccgcgagcttggcgtcggccgcctcctgctcgcgtttctgctcgaggtcgacaaggtagtcggtctcgatcgcgcacccgggaccgtcgtcctcatcctctccttcaccattgctgggagttgcctcggccgtgtcgcgctccttgccctcattcaggtacgaatgcgagccgggcgcgtgattgtgagtcggcttccaaccgcccgggatcgagacgatctcgcggatgttgagcacgtcgcgctcctcttcctcgacggcggccagaatccgctcgagcacggctcggacctgactcgaccgcttgtctgacgggggaaggaggaggtcgccctcgtcctcgacgagctcgtgcgcgcggcgcgacgaccaggcgtgctcctcaccctccgacatgagcaggagccgccagcggttcgtccgcggcgactggtcgaggccgagcgcaaagatgacgcagagtgcaaagatctgctcgagagaagaagagtcaggcaccgcttcatgggcatagctgtggactgcgtacgtacgggaatctggacgagcgcgagactgaagcggcggtacttgtgccagagtctagcagccagtcggagcgagccgctgcgtcagaggcagaccaagaagagccgcagctatagaggaggactgacttccatcgccagacaaagggcagcatgacgagcgtcaccctcgttgccgtcaacaggaccgacttgagcgcctgcggtggtggcgggcaagccgggctggcgggtcagctcgctcaagctcggcgaccctgccgtccaaccgatgacgcacggggatcgcgagaaagacgacatcttgccgagcaggtgagctatggaacgtccgtcgcgactgaaggagcagaggagttggcgatcgtgctgggactagagggctgagcgggccgcttgacgtcaggggcaggcgatggtcgacgatggacgacctggccaacgagtcgatcctggtctgggcgagcggccgcaagcgacgtccgagagcgccggcgacacgagaatgttttaccattgtggctggcagccaggtgacggaggaggcgttggtgaggtcgaagagtgggagatggttgggagagtcggaggagcgtcggccgcaagtcgggtgacgtcgggcgtagcctccgcgcgcacgacgagccgtcgacggtcgctgaacgtccagaccgtgttctctcgctcgcagagacgtggtgctgtcgggagccagggagcgctcaagggagagcggcacagcctgctgtctgagaaagactgaagagaaggtgcaggatagggccatggctttcagaaacgcatggagagcatggagaaaatgcaaaagttgtcggccgctcttcaatgacctcgaaacggtaggacagactacggcggggttaaatccatgagctgcgagcgtgcttctgtccgccgttggacctgggggtccggagccgtcgagcgatgccggaaaggacgagtcgcgaggcatccttgagtggggaggcaaaggaggagggggaaggggagaagaaagtgagaaagaagcaaggcgagggcaccaaacgcagagtcggccttggccagagagtgaggccaggaccaggacacggcatgccaagtagagcttgacggagggagggacgggtggccagcatcggcttgacgccctcatcgccgaccgacgcccccaccacctctcgggtgtcagtacggtcgcaggcttgcggcgtgagtgttggcgtatggcgcggtggcctccaaggaggaggaggaggacgggtcgtcttttagcgctgaagggtggtagtcggcggcgaggaaagcgagcggtcgagccgagccggcttgagaaaagacggcggaggcttgtaaacctcgcgtgtaacacagccttacatgcgagtaacagcgctctcggcccgcccggcgactccacaggcgcaccaaagtccccttgcttgcctcttcgtctcgccctcctccttcgtcctcgcagcttctcgttccctcgtccgctccttctcgtccctttcctctctctctctcctctcgccatggtacagttcttctcgcagtcatttaactacccgtgcgtcgacctcgcccacctcacctgccacccgcaccaagaggcagcctgcgggccgccgcaaccaccccgtccattaccctccgagctctgaccctttgcctctgcacccttccgatcggccttcaggcacgagtggtcacgggtcattctcggcatgtggcagaagtacccgaacccggcgacgtcgcatgtaatcagcgtcgacacgatcgaccggtcggtcgacccagtcaccggtatcatccgctcgtgcgccctccctccctcttgactcccggcatccgggcctgccttcgagcatgaccggcgtccagctgtaagacgcctgattgaaacctcgctgacgtatctcctctcgcagagaacgcgtgattgggtgcaagcagtcggcgccggtgagtccccccccccccgccttctgcgcgccgccggtcaagctcatgcttcggcccgcgccggctctgcccctgcacgccaagagctcgcgagactgactttccgcccaccttgaccttcctgctctggatagaaatgggctatcaaggtgcgtcccgctctctgcctctcgagaccaggtcgtccatgccgctttcgaggactcgtcgctgacggctcgccgttgctcccgctctatcgcagatgctcggcggttcggacgacgcctacgtccgggaagtctcgttctgcgatccgatatcgcgtaaaatgaccatgttctcggtcaacctctcgctctctcgtacgttccccctcccccctctcagctctcagccccgcactctccgtcgactgaccctcgtctgctgcgtgcggcctcatttcccgcagaatacctccaggtgctcgagtcgatctcgtatgcaccctcaacatcacacccgacctcgtcgacgctgttcgcgcaaaaggccgagatcctcgcccggtcgtcactctggaagtcggtcgacgaaaagctcgagaagatgtcgctcgagcgcttcatctcgaacgccgctaaaggcaaggagggctttgacggcgtcctcagccggctctggagcgacgacaaggagacggtcgtcgccgcctcggtccgcggcgacacgcggcgatgagcctcggactcgctcgacagcatcccaggccgcgccgccgccgtgtgttgccctgagtgagcggattgagcgacagctgagtgatgaggctgccggcgagcggtccgacacggagggaggggagaagaaggaggcgtcctagacgagcccttgccttggctcaacaccaaccagccccaccaggtgcggcccgctccgctgtcgcgtctactgccctgtccctgaccttatctcctgacctcgcctctgcagtactttttttcatagaccaccgagacgatttttcatgccccccattgcctgctttactgttctgccgtttggattttgcaaaggggtatgctcaggacctaagctgcccagggcttgcactcagtcgctctcgccatcgtctttccgcacgagccttgttacaacctcagagtctcgggttctgagctttttgctcaacccactcgctgcaggttgcgtccctcgcggaaagactgggtgcatcttgcctgcaccgtcagaagccgtccttgtccaaagttgctgccatcaaattggcctggcagaccgcaagcctacttcttaacctcctccttagttttcggcttgaaaaagccggtcagcttgcccatgccggtcgtgttgactcgtttgagcttgccgacgcccatgctgacgggcgcggccttgcgcttcttttcgttctccttgtcgcgcttgagcgcggctttcgactcttcgatctcggcagcgaaggacgacgacgcgccgagcgagggcgctagcgaggccaggtgggccgtatagagtgggaaggacaggccggccagcagcgaggccagcagcgtcggcggcaggtacggctgaagcgtcgtcaaggcgtagtgcagccgggcctctgctcaaaggatcgagcagagcacaaggcgatcagtctcactgttgcatcgcttcgcgaacagtatcaactcaccctcgcggataaactcaagtcgcgcctcctcctggaaggccttctcgcccggctcgcccttcgacgccgcgccttcgtccgttgcctcgagtccgatgaggccgtctttcgcgagcatctttgtcaggccgggaaatcgcccgtaaatgttcctttgggcgagacgctcggccttgcgtcggaggtagatgtgggtcttggccgacgagaagcggtaggcgaccattccctcggcgacctctgcaagattgagccaacgaatgaggcatatcagcgctgcaatccgcccagtgttcattcaccagctgcatggcagtcgatgagcacgcacctttgacatcgcagacgcgcgagagccacttgccaaccttgggcaggccaccgaggtagaggacatcctcgacctcggcctcgtctgtctcggcttccctcgagccgtccgcatctgacgcacggcccttgcccttggcgtctgtcggcggaccggcgaacggcgcaggaagcttcaaggctggaagcgaagctgcagtcgagaagaggtggtcggcgaggaggaagcgtgacgggctggccgtggtctgcgagcggggaaccgtcagctccaagtgcaagaggaggcttaagaggaaggctcggactgaccgccaggacaatgggtaggagcaggaagacgggatcgatgggcgtgaagagcagcagtcggccatctgcggccgatgaggagcaaggcagccggtcaaacgcgttcccgaccgagaggatcggctcaaggcgtgagctagcccacgcaccttggacgacttcgtcaccgaggaaccacgatcgttcggcctcgggtgcaatcttctggacctcaaagatgtcggcctgagcgtcatcgacaaggtatagtgctgggaggccggtacgggcgtttggcagccggaggagccggtgcgtccgcattgacgacggcgccggcgctgaagagcccgaggcgaccgactcggctagaagcgacgagggtaggatggcgacagacggcggcggcagggacatttgtgtgcgtgagatctggtgggggagcaggccaggtcggaagggaggtctggccggcctggctgccctgcacgcgtcggagcgacgcgtcgtcgtctcgagctgtaaccctagacgcggctgacttcgtctcgggcgcggtgtctctcgctcaacaaggcccgccgctgaccgacgccccgacgtcgctcgaaacgaaacgcctctctcgttcctctcatggccaacgcctagtctggccctcctcttctcccttactcctctcccgtgccatccccctccctctcgacctttcggctcagctcacctgctccggccggatgccgcgctacccgctcgattcgcccgcaaccgagctctcggccttcgactcgctcccgtcgccgacctcggactacgccaactcgctcttctcgccgcctctgacaaagtcttcgcaactctcgctcaacacgaccgtgctcggcgcttcgaacgtctcccatccgaagcagctgacgacaacgagctcgcccgcatcgcacagcagcccaagcggccggcgacgagcgccacccccgggcggcggcaaccacgtctggaagcacgtcgacgtcttctcgccaacactcgaggaggacgaggacggcgcgttctcttcaccctcagccggctcctctcagccttcatcacgaggccgggctcaaccccgtccgcagcaggagctcgttcaagagaggagcgagacgccgcccctctggttcacgcctcgccggccgtcgggcgactcgattaacccaccgtcccgctcgtcgagcgccaacctcacaccgacgaaggctggagcccagccgacaccatcacgggcgcaggcaatgatctcacagttcgagcagcgtcagcggtggacgcctcggtccgcctcctcgccctcgcgaccgcaacagcaaaggacgccgtcgcgaacgcagctcgacaagccgctgccaccgctctcgcctcaggatacgcccggatcatttaggacctgccccgtcgtccaacgatcgtcaagctcgttcctccctgccccgtcggcgccgtcgccttacacctttgggtcgcgccagtcgccgacgcaccggggagacaactcggtcggcccgaagcggtcgcctctccgggacggcatcaagtcgctcgttaagaagttctcgtcctcgacctcgccctccaatttccggcgcgggcacaagtccagcgcctcgtcggggagcgagatgagtatctcgcggccgacccacattggcggtgtcagctgggacctccgaccgctcccgggcggcgacagggagacggataccggcgaagaggttctcggaagcgacgtcgccgaccggagcgcgctccgggactacccgcgcacgagccggatggacggcgagtacagcgagagcgaaggagagccgtacccgctgtcccatgccggtggccagggcccggctctgagtcggccttccgacgagtcagtacgagcggagacaccagtatcgccccgagctgcccggccgcttccgtccgctcctgctacggcggccactcctacgactctgagcgcctcggccggccagcctcaacctccgactaggcagtcgatgacgtcgtcattcgatcagtcaacgtcggcccactcgcattcgcccatgctgcgacacggcccgctcctcttcttctcttcgacgtcgtcacccccgcattggctgcggacgaccgcgacgctctcggcttccctcatttcgtttgcctttgcctcgcttcggggctcgatcgaacacctcgactacaacctcccgggcgacagtatcgtccgcagcgtccccgaacgagaggcgagcggccggtggccagcgcccttcggtcatggccaagacgacgacgagatcgaggtccactacctcgagattgctctcgcgggccaaggaagcgtcgccgtcgccgtacgcaacgttggcgaaaggctgggctgggttggctccatctggtgcgtcgtcgctcagacacagcctctggacaaaggcaaagactcactgatttggcacctgctacagggacgccatccttgctggcgtcatgtcgcccgacccttccggagcgcagatcctcgcggccttcccgacggcgcccgtcgctcctgctcggctcgagatcgctccgccgctaccggttgccgttgaggacgttcacaagggcctctatcgcgtggaaaactcgccgcaggactcactcctgacgaccccaacgctcaccccagctcatccagagcaagctgccagctacgacacggccgacatcgtctcttgtgcaatcacgaccgacgaggagggcagcgggtcgacagacgacgctcacatccgccgatccgaggactctgaccggtcgtcgggccctccccagctaacgctgctgccgttgaagccgctcgcgctcaacttgctccggcgaggatccggcgccgaggatgacaagagcgacggcgagcatagcctgcgcttctcggtcgagcagctattccgtaactcggagctggcctcgacctatgccccgccggcgtcgccctcgcccccgacgcccatccggacggtctttggcttgccgcctcaagcacgcaagcagacaaacgtcgccgcactggcgtctgcgtacgagagcaagtcggtcgacagcaacagtcgcggcctcggttccaaggcgtcctcgggcctcggccacgaggagcagggcgagggtccgacgagcctcgaccactttgaggaccacacgcgggccgcccgcatccgcagccaggcccatcacaagtactcgaagagcaacccgatgccgacgtcgccccctcgggtgacgacaaacgcagcgacggccggccagcccttctacttttcaacccggccgggcacctctccctctggcgtcgccatgggccgctcgcggtccgactcgctgccgcagacgtcccagcccatgttctcgcccggcggccggtcagagtactacgcccaagactttgacgagtccgacctaaacccgtcacgctcggcatcgcagatccaaaggcggaacccacccttgtcagcgatcgcggccatcaagacggggacggctcttcaggcggccgtccaggagcagtacgaagacgtttcgacgccgcaacagtcgctgttgctcgacggggccgacgtgatcgaggcgacgacgccggccgacgttggctccaactctcgaccagtgtccgactggccctcttcggacctgacggccgcaatccagtacctgtcggctcaggccgtcagcagcaacaaccgcagcgagctggccgaccagaaactgtctaccgtgcaggatggcgtcgtcgcgctcgtcacgaatgcactcaacggcgacggcaagctcgactcgatcctctcttcgatccatggcgtcgaggaaggcatgaaggaggtcgctctcggcgtcatcggcactatggacgagcggtcgaccctccaggcgacaatcgacgccgtcaacgccaaactctcgcacgtcctgttgctttgcgggcactttaccaggccgtccgctggcaacgagccagcctccccggtcgacgacctgggctccactacttctcggacgacccacttgccgctcgtcggggctgccgctcttccgagagacacggacggtcggctgccggatgcagttttcgacgggccagccgtgcctgccaagccgaggtcagccttggggttcgagtcgcaccagggcacgccctttacaaatgcagcaaccgaggacgctatccacgtaggtctccatctggtctccccttccgccggctgttgatgaccttcactttgcttcttgcaacagggcgcgaccgccgacacacttggcccgaccagcagcgcaagctcggacgatcgagtacgtgctgcctggtccaaaccttcccctttgctcagcttcatcctgacatcctcactctcacgtcgcacagctcgaggaactgcttcacttggtcaaggcgcaaaacgctagtcgcggcccacaggaccagcagacaaccgacatcgcacgttgtgaatgccgtcggctctcaacttgcttcagccaaggtgctgactcatttcgaccccttttgcgcccctccgcaagatctcaacgagctcaacacgtggatggaagagttcgtccgtaacggtcactcgtcggtcgacgccctttcggatcaggtcgcgcaccttcacgacctcattcagccccctccggcggcgacgccgcgactcggcgaagacccgcagggaggcgcttcccctgccggcatcgttggccagatcgccgccttgcgcgaccttatcaccgaggtccgggatcggcaaatgcagacgggcccgcaggagacgaatcaacagaggctcgagcagctgctcgactcggtcgagtcggaacgccagcactaccaacagcaaaacaactgtccgtctctttccttcctcggacgttttcagcccggctcaccggtactgatactctcgctctcgctctcgctttagccgtcgagtccgtcgtagttctgctcgaccggcagcggatggagaatcaggagctgctgaaagccatggtccacggtctgtctttttatgcactgtcggccaaagcgagtttacctctgctgactcggatcgtacctttgccccccacagacctcaagagcgagatccagggcgagcggattcgctttgtcgacgccatgcgcgacgcaacgcagatcaacgtcgagcagcacctcgaaaagttcaagcagcagctgtcgaacgaggtctcgcgctcgctccacgatctccatcggatgcgcgaggaaaaaaaggtgctcgaaggccaaattgccgagctctttgccttcaaggtcaagaatggcgacgtccttcgggtgccgtcgacaccccaggcgtcgaccccgcgccggccgagctacccgatcgccaacccttcgcccttcccatccccctcggtgccgctccctccacttcctcatcagcccttctaaacccaactcgtcgcctcctatctctgtctcgtcctcttatcttttctgtcgcaactttgttacacctgtccgcctgtaatccctggctgtaacgcttcgtccccttcgtatcaccgaccccttgccgttctatctttgctccttatatgaatagtctcttgacccacacgcaagccagaaccaagaagttcatcttatcgtcacgcgccgctcgcctattcacttccggctctagcttagagctcagtcttgcggttctggatggggatcgtaatcaggcaaggggtgtgtcagagctctatcgttgggccacgaacgactccattacgactgaccttgatgtcgagcagctcaacagtgaagacgagggtagcgccgcctggaatgacgccgccagcgccacgggcaccgtagccgagcgcaggctgccgtggtgacggccggcatagattagctagcaggcacggcattcagagcaaagccagaagcagacgaacggggatcgtgagcttgcgcttctcgccgacacacatgtcgagcaggccctggtcccagcccttgatgacctggcccgagcctaaagcaggcgtgtgggaagggccggggtcagccgctcgtccggccagcgaagcgggacctacgtcgcacgcacccagtgtgaattcaaagggaccccgcccgatggacgtgtcaaactccttgccggtgtcgaaaagggacccgcgataatgcattcctactttgtcccccttgcgcgtcttcaaggggcaatcctccggcttatgggtgacgcctacagatggtcgggggaggaaggttagccgtggcgggaggtggtagaatagcgtatgaggctccggcactcaccaatcaggagcttgtccggggcctccttgcccgaggaggcagcgacgaaggaggtgaaggtcacgaggaaggcggtggcaacggagaggaacttcatcgttggttgtgaagagaagggatggggtcggagggcgaggctgcgatgccggcaggtcgggcctttcgctcgcgctggcagcagaagcgcgcagcagcccacttgaccaatggttggctcactcgagggtagcccctccgagcctgcctcctacccaggcaggttccttgtccaggcctacagtaccactactctacgagatcttcagctccggatgatggctgattgtagattcgggtcaggggctgatcttcgacgacgcctgccctcgctcgagccgcctcatcacggcgtgcgacggccagcggtcgcgaccccttaagaggcatgatggatgcacctctgtagctgtccatctgtcgtaggcactggtactagtccttccaacgtccaggaagtccatggctgaaagaaagcctgccaagtcgcaacgtcccctcgatcgattcgaccttgtagagctcgctgccaaggacgtcaccatccgtcagcagcgaacccaagcagctcgacactttacctcgctactctgtttgggcttcgagcatctctctctcagcctgtcctccattcggctggcctgctcgctgctggctcggaatcagaggtcgggcgatgaaggcttggcccgtcgcaaggcgggcgccaacggtgtctctgcgcgtccacggctgaaactctgaccggttgcgctgtcgggccgctctcttccgccagccatcttccctcgccgcgcctccagcagagcaaggacccccgaaaccaaagagaggccgacattgtccgctggcgactgcccatccgctcgacgccctcttccctgcgcccagagtcaccggccacccgctcagcccagctatcccacccattccgtcggcccgcagcggcggcctccgaccgttaacacaaaaggagggacccccgccgccctctcgacgccggcattgggacgtgagagctcttcgccacctcatcgcttctagtccatcaggaccccagcccggcttcccttcccttgctcctctcccgcccttgcgcgtccttgctctcgcgtccggtcgatggagaaacccgaagagtcggcggccgcgcgcgagcgcgtcctcctcaagaagttcgggggcgaccttcgcctgcccgacggcaaggcatcgacgccgtttggcggcatggattggcccggcgtcgtcgtcggcagcgccgaggacgagacggacgacatcatccgcggcggtgtcggcatcgcccaccaccggccgagcatctctggtcaaggggccggagccaaggcaaaggagctcgacgccggcatcgcgccctggctcgctgcggacttcagcgtgcgtccctctgtgctcctcagcttaccgccgcctgctggcctactccgggtcgtcccttcgctcgtatcgctgacgccttgcttccgacgcgccagccgccacaaggccggccgccgagcatgcacacgctcagccactcgacctctgcgacccatctctctggcctcggctccaacggcagcagcggcagcagctctaccgtgactcagctgccgcgagcgagccggcagagcaccgtgagcacgatgctcggctcgtcggacaagaagccgcgcggaagcaaggacgcgtcggccggcgacaaggcggtcgcgaacggcaacggcgccgttgacgagaagcgcaagcggagcgccttcctcggcggcctccagttcgtcaagcgcaaggccgccggcggatcgtctaacggccgaacgaaggaggagggttcgtttttggcagcggctggcgcctcgtgtcacgttgtccctccggcccttgtgctgaccgaccatctcgtgtcacgtctgcagcggtgcggcacgcctctcggctcgggtcgagcagtacgctcagcaagcaggctgaagcccggccgaaccacgcgcgtgtcgactcgagtgggctcgcgctcccaccgctgacgaccatctcggccgcgggcgagttgtcaccagcccttgggcgcgactcgtcgcccgactcggcgcgcaagagccgcaagaacagcagcaagaagggcagtaacgcctcacagacgccgagcacggccgacatgtacctcctcgacacagacctctcgcacatggagggcatcgtcaatccgacctacagcgtcccattgacggctgcgagccttgacagccgggcgagcgcatggtccgagagcatgtcgtcctcgggtacgcggccgaacggctccgagggctcgtcgaacggcatgcccttcaccaacccgttcaacagcggcagccactcgcccgacgcagctcgagcgaacggcggaggccatccgttccccgcaacgctgccgcgccggccgtcccacctccggacgatggccacaccctccgaggagggcggcaatccgttcgacatgctgccaccaccgatcctgggcagcggctctcggccgccgaacgacggcacgacgttcagtaacccgtttgcgagcgccggcaagggcatgacgccgaactcacggaattctcatctgaagctcaacctcaacgggctcgatccggcctcgcagtcgcctctgtcgacgccgaaagggcctggcgcgctcgcccaggcggcagaacctccggccgtccttgctgccgccgtctcgggtgcaccgccaatccggccgcaggaaaaggcgtggatcgcgcccgagtcgtggggcgtcgagggcgacctgccagacgaggagcacgagtcgtcgagcgaagatgccgaggacccgtcgctcgagcttctcgatacgttgaaccagggcggcatgcgcagcctgcggccgcccggcacgcccggcatcgaagccgaagacttcaactgggtttcgccaggcaccgactcggctagcttggcgtcgcgtccgatgacgggtggctcgatcgccggccggtccatgaggcaaagtaccgtcagcatgggccgctccagcacagctggcggcaacaaccggcccgggacgggagggtggtctaaggttggctcggcaagcgcggcttcaagtctgccggtgagtcgtcctccagctggaagcgagcgagcgagccgatcctgacttgtcgttctgggacccaggtctacttgcgcgtgtaccgctcagatggctcccatacgaccattgcctgcgccctcaactcgacgacgtccgacatcatctcgatcctttcggtcaagaacttccagtcaaagggcggctaccgactctacatccgcgagcgacggaccggtgcgtcccttgacgcactgcgcagctgtcgcggccagagactcactgctagcacttttacagatcggccgctggatcctcgcgagaagccagccctcattcagaagcggcgacttatccaggccggctacgacgagacagataagatcgaggtcatgggcaaggacgacctcggcatgctctgcaagtttatctaccggctgcccaagatggctggcgccgagacggtcagtcccttcgttgcgcaggcgcggctggagttctcgtgctgactttgtggacgctgcccgaccctttctcaggttgacgagagcgcctttgactcgtttgagcacgttgacctgtcgggccgcgacatccagatctttccgatcttcctccatcgccacgccggcagcatcattcacctcaacctgtccaagaaccagcttcaagagctgccgtccgactttattcaggactgcgtcaacctgcgcgagctcaagctctccaacatggcactcaagcgcgtgccgccgtcgatccggcagagctcgtcgctgacgcggctcgacgtgtcgtgcaaccggatcggcgacctcgacatggccggctttgaggcgatccccggcctcatgtcgcttaagctccagaacaaccggctcgccgtcctgccgtcgtactttggctacctcaaggcgctcaaatatctcaacatttcgaacaacaactttgaggcgtttccgagcatcgtctgcgagatcaagtcgctcgtcgacctcgacctctcattcaatggcatcgcctatctcccgcccgagatcggcaagctcaccaacctcgaccggcttgtgctcgtcggaaacgtcatctcgacgctcccgccagagtttaccaagctcgaaaacctgcgcgagctcgactgccgccggaaccggatcgccgactttacgcacgtctacgccctgccgaagctcgaggtcctcaaggccgagcgcaatgaggtcaagctgatcgaggcgacctttgggcccaagatgaccgatgtcaacctctcgcataactcgatcactcgcctctccttctcgctccggctgaccgacccgtcgtccggcctgacgtcgctcgacctgtcgcacgccaagctgtcgtcgatcgccgaggaggtcgtctcccagcttcagagcctcgtcatcctcaagctcgacggcaaccagtttacccggctgcccgagggcatcaccaatctcgtcaatctgcgcgagctccatgcgactgacaattcgctctcggctctcccggtcggaatcgaccgcctccagcagctcgaggtcatcaacgtccacaacaacaacctgacggcgatcccggtccagatctggtcgtgcggccggctcgtcagcctcaacgcaagctccaacctgatcgacacatttccggatccaccagaggaagcaccgccgccggtctcgactgccgatggcgacgacggctcagcttctccggtcgtccgggacctccaggcgctcggcaagtcgcttcggtcgctacagctctgcgataaccggctcaccgacgacgtcttccacccggtctcgctcctgacggtcctccggacgctcaacctaagcttcaacgagattctcgaggtgccagcgtggacgctgcgcaagaactcggccctgacggccctctacttgagcggcaacaagcttacgagcctgccctcggaggatctcgagaaactgcggtcgctcatgatcctccacgtcaacggaaacaagctccagtcgctgccggccgagctgtccaacatgcatcggctgacggtactcgacgtcggcagcaacgtcctcaagtacaacatcaacaactggcgttacgactggaactggttcgtgcgcgagcggtgcctgagcctttgacgcgcgccttgctgacccgacttctggcttgacctgaattcgcccgccgcaggagcaagaacaccgagctccgctacctcaacttctcgggcaacaagcgtttcgagattaagccgagcgaccgcaaccagctcgacaacatgatgggctcgggcgcaaaggctgactatggctcaagcttcaacccgctgacgcacgtccggagtctcggcttgatggacgtcacgctccgagtgccggtgccggacgagtcggacgaccggcgcgtgcggacatcctactcggtcgtcaacaacatgtcctacggcttcgccgacagcatgggccagtacgagcacctgcagctgtcggacctcgtcgtccccaacttccgcggcaaggacaacgagtgcctctttggcatgtttggccgggcccacgtcccgaaccggacgctcgtcggtcgcatcccgcgctacgcgacagagtggttctcgtcgacattcgccgaccagctcaataaggtcgtccccgacgaggacgagggcgtctcggatgcgctccggcggtcgttccttacgctcaataagaactgctacgaagagctcaccgcccgagtgaccggcgacaagcgcaagggctcgcaagggagcacgaacggcgcggctccacccccgccgagcaccgactcggccgcactgtttaagacgggcgcgtcgggcgtcgtcgcctacatcgtcgacaagacgctccacgtcgccaacgccggcaacgcgctcgccgtcgtctcgcgcaagggcagcggctatgaagtgctcaccacccggcacgacccctttgaccggaccgaggcgacgcgcatccggctcgccgaggcttgggtctcgccccgcggcctcatctgcgaggagctcgacatctcgcgcggctttggcttttaccacctgttccctgccgtcaacgcccggccggacgtccgctcgtgggacctgaccgaggccgacgagtttgtcatcctggctaaccgtgacgtctgggacttcatgtcgtaccagacggcggtcgacattgcccggaccgagaaagacgacccgatgatggccgcccaaaagctgcgcgatctcgccatctcgtacggcgcggacggcgccatcatggtcatgattatcggcgtcggcgacctcttcaagacgcagggccaggcccagcgccaggttgcgctcgatggcggtgcctttgacagcaagcgtgtcgcccgccgaggccggaccgacctcgtcggcgaccggacgctcgctcggcttgaccgcgagatcgaacctccgaccggcctcgtcgcgctcgtcttcaccgacatcaagaactcgaccgcgctctgggagacgaaccagggcatgcagacggccatcaagatgcacaaccacctgctccgccggcagctccgcaatgtcggcggctacgaggtcaagactgagggtgacgccttcatggtctcgttcccgacggtcgcctcggccgtcctctggtgcttcacgtgccagctgatgctcctccaggaggactggccgcgcgagattctcgaggccgaggacggcaaggagatcttcaccgacgaaggcgagctcatttaccgcggcctctgggtccgcatgggcatccactggggcatgcctgtctgcgaggccgacccgatcaccaagcggatggactactttggtccgatcgtcaaccgtgcggcgcgaatcagcggcgcggccgatggcggccagatcatggtctcgcaggacgtcatcaacgagatgcagtcgctttacgactcgctcgacgcgccggatgtcgacggcgtcgccgcgatcgaggaggaggaggacaagttcagcccgcacattgctcagcttcggaagctcggctttggtgtcacctcgttcggcgagcgcaagcttaagggtgtgtccgctctgtgttgaaggcgcctctgagggtgctgatccgtctcttcctcctggcaggcctcgagactccggagaagttgtcactcgtcttcccggcggcgctgcagccgcgactcaacttcacgcacacgcgcgaggcactcaagccggcgacgctcatcgtgccaaaggcgggcatcctcaacgtcgatgacgtccgagcgatggcctttgtctgcctccggctcgagacgctctcggcgtcgggccagagcctccagcagacgcaaggcctcggtcgccaggagctcgacaaccgggcgtcgcgcttcatcggccactacaatctcgacttgctcatgcctcaaatctcgcccgagatgacagacgacgatctgctgatggtcgtcaactctcgtgagtgtcggcggaattgcctttctcgagcggacacccctggctgacgcggctcctatccacagtctcgatccggatcgagaacgccctcagctcgctctacatgaagcagctcggcggcttctcgaccgtgcttgccgctctaggccagggcgtcgcgatcgagcccaacctgctcgttcacgcgctcggcctcttcagcaacctgatgccgaccggcgcgctcgcccatggcctctgagcctcctctcgcttaccatcttctctcggctcccgccagtcgcacctctgctccattccccctctgcgcccatacccctcacgcctgtttgttcttggatcccactgttgtacgctctgcgatcgatcggaacatgcccttagctgcctcgccagcgtcaactttctggggaaggccatccggcctctcgccacccgggtccattttagctctgcgcagccagccgccagctaccgctttcgattgcgtccctaccaggatacgttccattttagcagaagaagaggaaggagaagggtggttctgacggccccgcgcacggggcatacaagaagaaggagctgggagcaagattgcaagagcagacggtgcgaggcgagagggtgggataagcaagtcccgccgaggcggccgcaaggggcgcacgactcgcttagcggcggtcgggccacgaggcgatctcgatgacggcgtccttggcgtgaaggacgctgtccttgtctgtccatcgggaggggttttcgaagctagcatcagctcgttgctcaccggtcaagcaagccgcaaagaaagagacgcacctccgataatctcgatcgtgtccgagccgttgttcccgacgatgatgtcggcgccgctctcggcccgcaggcgctggatggtggcacccttgctaccgacgatccgggcgctgggttgacaaggttaggcaagcggtcagcgcaggtccgagcgagaagcagcaggcgaggagaggagggtgcgatcgaagagcaacgggatcagataaatcggttgtcgtccgggcccgtgggccggtcggtgggtggtgatgtgatatcgtcctgtcgtcgctcgacttaggccagcgcaaacctctcgtgcgagagagagagctggcaaggggggtggaagatggctgaaggctcacaagactgattgcgggaggccgacaatgacgccgagtgagtcggccgtcttggcctgctctagcgcctgctcgatgaccttcttgcccttctcgagtgcctcggcgttgcgcgacttgagggtccacgtgacctcgccgtcaccaccgccggcatagcggtcaaagatctcgaaaaggtagtcgatgtcggccgaaggctcgtagtcgtcagcgtcgtcgatccggccggtgccgttggccgccggcttggtagtcggccggggcgtatcggccttggtcggcgcgggtgggttgtcgacctggacgccagcgttgcgaaggttgcggaagatgaagccgcggtcgctcgaggtgatggcgttgacgtacttggacgggatcgtgaccgtcgccgtctgctggtccggctggggcgtgcgcgtgcgcgagggagcctgctcagagacgatctgtaagcgcaagaagaaggggatgttgtcagccaaggcaagggctgtgagggcagcagcagggttcgaacacgcaccgagagctcggccatggcagcctcgacggccttgagcgggccagcgaccttgacgatcgacttagggtcggcctcggcgagctcgtcggtgttctcgggagtgccgaacgagtcgtactgccggctgcctgggaactggatcgtcgcgcccgtcttcttctggaggtccatcagagccgagccgccgcggccaatcttggacgcgtgggcggggacagggaccgaaataccacggatgacgcggtccttgagctcggcgacgatgcgctcgagctcctcctggagccgggcgacgaggccgggctcaccccggaggcggacctcgtccgtctcgttgccgttcttgggaaacgagacaaggccagcctgctggcggccctcggtcgggccgccggccttgatgacgatttcgcgcaggcgcgagccgccgggtccaatcagctgccggtggtactgcgaggcgatgttaacggtcgccgtggtctcttcgccgacggtgccggcaatctcgaggatctgggccttggcctcggtgatagcctttttggtgccccggacggtgatgttggtcgtcggcgttgaggcgtcggccttgtcgatgtcgatgatggcgtccgtctcggccttgatctggttgatctgcgcgccggccttgccgaggaccttggcgacagcgcgcgaggggatcgagaaggtgacggtctggccagtctccttctcgtactcgacggcctcgagcagctcggccttggccgaggcaacgcccttcttgccgccgcgaacgagaacctcgtccggcttctggtccgagttctcgcgcgggaatgtaatcttgacggcgtacttctcctcgagccggatcgcatacttgccggacgagccaatgagcgccgggtggaacttcttgggaatgacgagcgcgagcgtcgtctcgtctgcgaggcgctcgacttgggccagcagccggcgcttggcctcctcgacgccctccttgcggccgacgatcttgcacgtcaccttgccaccagtcggtgcctttttggccttcttgccgtcggcgggagcagtagaggacgacgaggaggagggcgcgtcgtcaaactgaacgcggacgccgaggtcttcgcggagcttgttgatggccgagccggcagacccgacgaggtggccgacgtgggcctggtcgacggcaaactcggccgtgtagccgttgacgacagagtcgttctgagcctcgtcgacgatgcggaggatctccttctcgacccgctcgacgtcggccttggggccacggatgacgacgcggtccttgtcgtcctcggaggcctcgcggccgccgccgacgcggacaatgacgaccttctcctcgccgatcaggctgcaacgcacggggaatgagatgatcagttcgaggcagcatgttgtgtcgattcaaagaaggacgtacgcgttgagcgtcgtgccgttcgggccgatgatggaccggtgccacttggcctcaacgtcgagcgtcgacgtcttgaggtcagcgacgtccttaacgagcttctcgagctcggccttgacctcggcaagtttagccttgacgtcgccaccggcggtcgccgtcgggggcaggatgaggaagacggtgttggcctcgggtgagtcggccggtgtcgtcgcagaggggaagacgacctcgacgccgtgctgcgtcgagaactgggcaatctttgcgcccttcttgccgatgaggatcgggtggaggagctgctcaatctcaacccgctcgacgcggtccttgccgagcgccttcgcccgactgacgacgtcctgcttggcagcattgacggcggccttgtcctcgccgacaaactcgaggaggaccgcgccagaggcctcgatgctcgccttgagcggcgcaaagaccttggttggcgggttggcgctagcgacagaccggagcgagccggaccggacgaggtaggacaggagcgcgaggccgtgcgcgaggtcgcggtgggccgaggcgaggtcaaacgtctcaaccgttatggcgttggccttggtcatgacggtgccgagcgcctgcgggagggccgacgacgggccgcggatgacgaccgtgtcggacgggtcggcgatcgtggggagctcgacgatgcagccgtgcgtcttgagaatctcgtcggcattgttgccgacgaggaagcggtgctggcgcttggggatcgagatgttcagcgtcgtcgtcgtcgatttctgcgaaggcggagggcgatcagcgtcagcagcagtctgggcggtcgacaagtcttgcagggccactgacgagctcctcatagaggtcctggatctgctggacaacctggccgacggcctcgcgctcgccggtgacgatgatggccatgtccttgtccttcttgccgccggcagcctggtcctcgacagcctcctcgcccttctccatcgcctcggccatgcgctcgaaggccttgatcatccggctcggcgggacgttgaccttaatggcgcccttgccctggtgctgctcgcccgtgaactggctctcgagctcggccttgcgggccgcaatgtaagggtagaaggcggccgggatcgtcttgatcttggtcgtcgtcgtcgacgtccggtggccaatgagcgagtgaaggtgggcctgggcttcgagggccgaaccctcggcgccagagatggtgatctcgactgtctcctctgccttctcgccctcgtcgtccgagtcgtcatcatcgtcggcgacgggcgccgaggctggcgacgaggcgtcccgcttggggatgtcgatccggcagccggtcgcgctcgtgatggccttgagcgtcgcgcctttagggccgatcagcgtcccgagcgtcgagaccggggcgtcaaccttgagcgtgaccgtcttggatagccggttggtgagctggcgggcggcgtcggccgtctgctttgctgaggcgcccttgatgaagaacgtcgtcacgcccgtcttcatcgccttggaggcctcgatcgacgtcttggtcgcgtccatgatggcccgcatcgtcgtcccgagcggtacaaccttgccgtcgcgatcagtctgggtgccgacgacaagcgagagcgactcggtcgccgtcgtcggcttggccggcgcaggcgcagtccgggccttggtcgccttgccggcagaggcaccccaggtcggggcggcccgggcgagcggcgctgccgagggcgcaagggaggggaaggccgactcggacgaggtgttgaggtcttcggccgacggagcctgtcgccgtgacgacgacgacgacgcgccgttcgcgccgttcgagctcgacgaagcggcagcggacgccgacgagagcgaggggaaggggtcgggcgctccctcgagggcgtgccgctgcaaggcgcaagaaggaggacgacaggatcaaaggcagcggcggacgcaggaggacaagcgacaggatatcagttgccaggacatgcagtgtatcacattgaccgctaaggatctcgcggcgagccaagggaccgatgaaggagctcgtacgagcagagatgggccggcacggcccctcttttcctcctccatcttggccagagtccgccagcgcacgcgatctcgtcgaggcgcgccgagcgcaaatcaaatacgtaccttctggaggtcggcggcgctgagcgacatagtacgcgaaagagaaaaggaagggagggaggagagagagagaaaagaggtcgagcgtgaaaggttgaggtcggaggggtgcagatggtagcagcagggcgaggcgacttgccttccttccgcgccgcgctgttgagtctgggctctgaaaatgcctgaatcaggcgcacgcagtcgagaccggattcgccgccatctcaaccagcagccggccagacggcactcttcctttcctctcctctcatcaccccctctgcttgccagaggcagcccatccctcgcacagaagaagctccgacagcaggctcttggcgtccttcttctcgttcccggtcctcccttcttcctctcggccgccgcccttctaccccatttcaacctcgccttgccaatgtctgccgccgccgccgccgcgccctggcaggcgtcttcgagccggccagcaggcaagcaggtcctccacgaggccgacgcccggctgctcgcctcgcgcccagacccggcgagccggaatggccagcagacgcacctcaagccatcggtcgcggcctcgctgaaggcccggctggcgaaggctgagctccggcggggcgaatacctcgccgtcagcgccatcgccatcctcgccgtcgtcgtccggctctggaaggtctgggagccgtcgtctgtcgtgtgagtggccactgagagagctctccaagctggtctgctcgatagctgagctgaccgcgtcgctgctgcttcccgcctgcatcacccgctccttgccacaccgcccggtagcttcgacgaggtccactttggcggctttgcgagcaagtacatccggcggacctttttcatggacgtccacccgccgctggccaagctgctcctcacctttgcggcctggctcggcggctaccagggtgggcccgacgacttcaaggacatcgcaaagtcagtctcgaccgtcgacgcgcgccgcctgcgcatgcgcgccgcggtgactgacgccgactgctgtggtccgtccgcagagagtacccctcgaccgtgccgtacacgacgatgcgggtcctgccggccctcctcggcgcgaccctcccggttcagacgtacctgacgctgcgcgcgctcgcactctcgcccctgtcggcctcgctcggcgcactcctcatcctctttgacaatgccctgacagcccagtcgcggctcatcctgctcgattcgcccctcgtcttctttacggccctcaccctcctctgctggtgccgcttcagcaacgtcgaccaacagcgaccgttttcacgctcgtggtggaggtggctcggcgccagcggcctctcgctcggcgccgtcgcctcgtgcaagtgggttggcctctttacgattgcgaccctcggcctctcgaccatcggccagctctgggcgctcctcggcgacctccgcgtctcgccgagggtctggctccggcactttgtcgcccgcgcgctcggcctcatcgtcctcccgtgcttcgtctacctcgcctgcttccaggtgcactttgctctgctcagcgccagcggcgagggcgacggcttcatgagctcagcattccagcacactctccgcgggcacggcatggaggacacgttcgctggtcggtcctgctgcgctcgcttccgcctgcagttgcgcagttgctgacctcgtctgccttgcctcccactcgcagaggtcgcttacggaagcacgatcgcgatccgtcaccttcacacgcagggcggctacctgcactcgcatgctcacaactacccggccggctcgcagcgtgcgtgcacccggggtgggctcttgacctcgtctgcttgcctaacgtcctgccctcttgccgcctctgtagagcaacagatcacgctctacccgcaccgggacgacaacaacaactttcaggtcctcaacgtctcgtcgacgtcgacgatcgtcccgctcgactggacgctcaccgagcccgtcttcctcaaggacggcgaccagatccggctcgagcacgttagctcaaagaagcgtgtccactcgcacgacgtccggccgccgatcagcgaggtcgacttccagaacgaggtctcgggctacggctttgacggctttgagggcgacgcgtgcggtcccttctttctcgtcctgcgtccccggcaactgccgtactgatttctctctcgcactcccaccagaaacgacatctttgtcattgagctctcgcagtcggagtctcgccgggcgcggcagaacgtcctcacgctgcgctcgcacatccgcttccgtcaccttctcaccggctgctacctcttctcgcacaagatcaagctgcccgactggggcttcgagcagcaggaggtcacctgcaacaaaaacccgacgctcgacaacagcttgtggtacatcgagaccaacacgcacccgctccgtgcgtcgtcatcccctcgctcaagcgcttgccagtcgacactgacctgcgttgccctgctcgcacagtgcctccgacggccgagaaggtcaactacatcaagccgagcttcctctccaagttctttgagctccaggccgtcatgtggcacacgaacgccggcctgacggaccgtcactcgtacgactcgcggccgtcggcttggccgctcatgcgccgcggcatcgtgcgtgccctccattcgctgctctgagccgaggcattcgctgaccttgctgattggcctccttgtgcaaaaaagaacttctgggtcaaggaccaccggcagatctacttgatcggcaacccggtcgtctggtggtctagcacgctcgccgtcggcgcctacgtcaccgtccggctgctcatgtttgtccgcgccaagcgaggcttccgcgatgcccaccaccgtaagtatcccctttcgctgtcgatcgatagcagagcttcagctgacgaaccccatctgcagccctcgtgacgacgtacgacgccaacctcggcttcctcttcatggcgtgggccctccattacttccccttctacctgatgcagcgccagctgttcctccaccactacctgccggccctctactgctcggtcctcctcctctcggtcgtgttcgaggcggccacctcgcgcgtccggcctcggacccgggcggccgccgccggcgtcatcctcgtcctcgccctttactgctttgcccgcttcagcaactttacgtacggccggccgtcgaccaagacgctgtgcgagcaggccaaatggcgcaagaactgggacttctcttggtccgtccccttggcggtcgagcagccatcactcagcgcctcgctgaccctccaagttgccttttgcttcagcgccgacttccacgacgacatggcggcctacacggccccgcaggccggcctctttgacccgaagccgatcagcgcgtcgctcgtccccggcgacgatgccgtccagacgtcggccgtcgagcagcacgtcgcgccggtcgaggccgggccgaacgcgttcgagcacaaggccgtacccgtctacgacgcccaggccggtgtcgcgctcgagcagggccaggacccgctcttgcccaagcacggcgacgctgccgacctggcgaccggccctgctgctggcgtcgtcgacacgccgccggtcgtcatgactgccgctgctgcaggtggcgtcgtcgaccaggtcctggagcaccagccgccctctccggctgctgccggcggcgacgtccacccgctcgcgatcgacgccgaagcgcgcaagcagatcgagcaggcgatccggaacgagatcgccgacgaggaggcccggcgccagcaggccgagcagatccaggccgccgcccagaaggaggaggccgagatcgctgccgccctctagatgcgatctgacagtggtgatggaccctcgcagacaaggcttggcttgcggtcccgaatgtgtcggctcccacagggatcatccatccacaatcgcaagtccagcatgctagtcgtgtaatcgtgtctatgtgcgcgcgttcagtccagccattcacatggtgaagtagacgaactgcgtcggagggaggtgtcagaccggatttggatcggactacaggcgtccaggcacgggcagagacgcacgagtgtgatcgcggtaggtgcgataatggcccactcgcagagggcgatggtggtgaagatcttctttgaggggcgcgccgtcagcggatcggctgggatgccgtttgacaggggagtcagtcgctgcccgagaggatgccgaaagacgaaggggagacccactttcggggttttcgacgagggcctcggcggccaaacgctccttgacgcccatggtgagcgtcctgccccagtaccggtggtcgaggaagatgtagaagaggccttgaggacgggtgaggatgaaggcaggtgtcagcagaaggctcggtcgaggagcggccgttcgacaggtcgctcaccgagaaagaaggccaacgtcttcatgccaagaccgatcttgagcacgttgatgtagcccatatcggccgtcatgtcctgcacgcgaccatagatgatcgacctggcatggaggcaaaggtgtcagcaagccggcacgtatttataacagctggtgtcgctcacatggtcgtgcttccgctgctcgtcagagggaagggccagggtgtcagcgctggtctgcggcaaagcctcaaacgacacctccctggaacgaacctgttgttgaagcacctccagattccgaacgcgctacccaatttgtgctggtcccggacgagaagcggctgtgagacggcgaaggggaagctgttgatcgtctggtagaacagacaaaggtaggtcgatgatgagctcaggaagcggtgagcgagtttgcgaatacgccaactatgctcttaccttaccgagcgaagcaaccacgaccggtacactgagagatggcaaggctcgcaagggtcagctcgagcactacgacgagctttggaaagaacgtacagcggatggacgctggaccagccgatgacagcgaggccggtaatccagaagagaggtgcagccgcgacaagatgcatgcggtctgcagacggcagcaagtcagcatcctgtttgctaagaggcaggtgcgggcatcacgtacgaccccaacggtcgacgctgtaggaggaatagggtcagatggtcagaggagcctcttggtgaagcaggcggccgttcgcacctgtagccgatgataggcgcaagcaggattggaaggactgtgtcggcggacgccaaaatgtttgagctttcatcgcacacgggacgctgctgcatactgtcgacgcacccttgccgccctgcgcggtgaaggcggccacttgctcgctcatgccgtctcgctgggcgggcggggttggggggtaatcagccggatgctacgccaggagaggatattaaggcgagacgtaccatgcggataaggtcagacgcagacgagtcgaatgccgaggccgctccggactggaagagctgggtcataggcaagatcaagaaagccctgttgagcgagatgagaggctgttagaaatgtcaaaccaggagtgggtgtcaaggcgagaagcaccagggcagccgtaggattaccgagaagtcaaaagccttggccttgaggccctttgtcatggccgcgtcgcgggcagaggtgaggcggtagggctcggggatccagtaccggttgcaggtgacccagagcaggtttgtcgagaagctgaagaggcagaagaacacgggctgcgggacagaatgttcaatgtagtcagcagagagagcgtcggcgagggcgtttgaggcacgacaagcgacgtacgatcctacagagaaaagacggcagcgggaggagtcagcaaagtaagaaaccgagctcgacggcaaaatgcagacgttgctcaccacagcgtccagccgtaccagccggtgccctccgaaatcgggatcgccgacgatccagaggtcaggctgatcgacgcggcaaccgccgctgcagaaagggggttttcgctggtcagcgttgcaccagccgagagcctctcatcgactcacactcaattccgtaggcgaaggccaagctcgacgagccaaaatagtggtacatgatcttgtgctgagcgctgtcgaggacggcagtgccgaatcctagaggaggacgtgcgagaagtctcgtcagccctctctgacgccttcgctcgagagcggcgatcagtgaaggacgcaccaatcaggatgtggccgactacaatcagacgccaaatgccgagcgtcggtccgagggcagcgatgatggctcccagaagactcgtgcccgtgcagatgatagagatggtgccaacgccgaacctggatggagcagacgaaggtcagacgcgtggctcgggcgagagtgtttcagttggtaaggacgtgccagtcaagacaaaggcctccgagtactggccagatgcagttgatgacgccgccggcggcgtcaatcacgccgaactgcacattgttgattccgagctcgttgcgcagggtgttcttgagcgggccgagagcggagtcggtccctgagcatgaagcaaaacagagtcagatgagacctgcgatggcagcttgagcagcgtcgcgagaacgcacactcttgtccgctcgagaaggtgatggctgtgaccagcgcgagcgccctccatttgaaggggatgttggcgatgccggcgtggacgccggtctcgagttcgctcggcgacgactcgcgctcgtcgtcgagcaggtcgctcccccgcttttcgtcgagcaggtcgtccttcttgtcgtcgggtgcgtcacgcgtcggatcgacgacggccgcagcgatagcgtcggtttgattgaggacgtaaggagttggggtgtccatcgcgttggcgagtgtcgagagagagagggtagagggaagaaggtaaagagcagcctttccctcctcgccttttgaccgaccggacagcttgaaaagtaatctgatcgtgccttcaaggggccaccgcggaggaagggtctggtcggcccgaccggtggccaggatcgtccttggcgtgcaagggggtccggctcggccgtccggggaagcgcgactgggccaaacagctcggcgctagccaaggggcggtgcacgacgagtacgaggggatgcacgcctggtgcggtcagtcgtaggaggtcagctttcgacacagcacaacagacgacatgaccgtcgagcgcacacaagggcgacggaggggagtggtcagcggccgcagctgcctggtcgtcaaagggggggcagccaaagtgcggggcccgcgcgagcttcaggcgtttccgttttgggcccgacttgggcttcgaatggagtcgggcacttgagcccgtcgctcgtcgcctcctccatcacctgccggccagccgtcgacgaccgacgacgaacccccttgacggcctgctatggacgtcgccctgacggccctgccgtcgtcggtggcctcgctctacgacgacgaggagatccagtcgcgctcgttcgagggtatcggcctctactctgggtccgttgtgcctcgtccttgcaccctcgtccctatcctgttcaacgttgaccgcctgcgtctctggccgtcacctctggccgtcctcagcaacaccaagctgccagcgcctctagatctcctgacgggtcagatcacatcacatcgaatcctcctttacccgccagtgccgctgccaacgtcgccggccgcgcacggcgtctccatcgcgctcgccgacgtccgctcgaccgagttctacgccggcttcctcaagtcgtcggccaaggtgacgctcatgatctctaccgtacctcccagtaccgacgcacctggcgctgtcgccgcttccggctggacctgcggcgtctgcggcttcgcgaatgcggccgctccgccaggcgcagcagaccgtctcgtctcctgcacaatgtgcggcatctcgcgggaccgctcgctgctcgccaactcaatcgccgtccggacctcgccgggcagcatacctcattcgcggccgctgtcggccgcaggcggtcatttggcgtcatggacctctgcctcgccctcgccgctcggggatggcgcgcaggtcgcctgcccgacctgcacctttctcaattcgcccctgctcaactcgtgcgagatctgcacgacgccgctaccgaagagggcaaaagcaggccccttaacgaccatcctctctccgaagccgatcgctgtaaagaccgccgagccacgagcgacggtcgagtcggtcatccggctcagcttccgccggggtggcgagaaggagttctatgcgatcctcaagcgagcgctcagctctaaggcatggaacggcgggcttgtgagtcgcctgtgctgctgcaaagatgatcgacgagctgctgactggcccccttccagcctcgagcgacttctgccgcagccctggcacagccctctgcgacgacctcggcgccgacgtctggcatcgaccggatcctttcgacgatgagcgtccaagactcgtctaggagcgaccggatcgagacgagcttgcgcgacctcgagagcctgatggcccaggcgagcgagatggtcaagctcgcgtcgacactctcgagtaggcaacccgttgtcagcggcgaggcggcgtcctcctcgaacgggccagcggcgactctggctgcacctgctttcacccaggacatgatgccatcgacggcagcctccgaggcggcctacctgcgcgagttggccaaggagctcgccggccttctcacggggaaggacggcctcatggtcgaccgcttcgtccgtgtcaaggggaagggcgaggaaaggcgcaagggccgaggcatgcttggcctcgacgaagtctggtgcatctggaaccgagcgcgtggcgtcggtgagttctgcgcagggctaaatctcaatccctgtcgactgaaaccgggcttctcctcgcagctctcatacctcccaagacgttccgctccactctgacctacctgccggccttgacggacccttcaatctcgctccggacattccgctcgtcggcgcactgcgtcctgcacactcccttcttctcggcgcccgctttccggcgccggctcctctctgtgctcggaccgacagaatccgccccgataccgtcgatctcgacggtcgaactcgcactggccgaggatgtcggcgtcggtctagcgaaggagatggtcgaggagcttgaggctgacggaggggaggtcgttcgcgacgcgcagggcggggcaggcggtggcgagcgctggtaccggaacttcatcagcagttgtacctgggccgaggtcaacgagtttacatgacagtcggaccggtagcaggctgcgttgcggaagagtcgtttgcgggcaggaggggcagcaggacgagtgaacaccttcagcacgctgagaggccaggcgtcgccccttcaatcctcacacccacctcgaccatcttacttctcccttgctgggcctagatttgcctcgttctcgcacaggacccagctctcggtccagctttagtagtcgcgagcccgaaacgacagctacagtagcgttttggcctcagcctgctacccatcggctcctcggcaccgctcccttcgccctcgacggcaccatgtcgaccaactttcggatcaccaacccgaacgcgccctcgagcagctcctcgcctggaacgagcgccgcctcttcacgctcagcctcgcccgcgaatggccgtccaatcagggctcctcatgcgccgaaccggccgagcgggctctcgcggacgggcggctttgtcgctcacgctgacgacagctcggatgacgaaggcttggatcgaccggccagccatcggccgcagcgtcgcacgggcaggcagcaggagtcagcggaagatgatgaagaagtcgtcggctgggatgctagcgggtgagtcggctgctccatgcgagctcgccgaagcaactggctggacttgatcgctgacctgccgcctctcctttccccctccctattagagctctgctgaaccgagctgagccggcgccgctggtcattgctccgctcgccaacagagactggcgcgagtcgtccaggtcgacggcccagcggtcagtcttcctgccagagagcgcccgggcagctctttctggcgaagagatcatcacccgcgaggtcgtcgacacgtcgctccataccggcgggctccgcatcatgtcgcgcgagcggccaaatggcactacgtcggctggagagggcgtgatggacagcaatggctctggcagcgctgcagcacagcccgagctcacgctcgagcagcgcgccttgcgagccctcatggccggcggggatgaggaggacggaggcgacatcggcgccatccccgtccaagagaacaaccgtgcggcgcccatctcggaagaggaggccttccgccgcgacgtcgagacccggcccgaagaggtgagtctgggttcatctggtgtcgagggcagcacacgcgtcgacactgacgatcttatcgatcttgcagtcgtcgctcgacgactatgctcgcgtaccggtcgcctcctttggtctcgcgctcctcaagggcatgggctggaaggagggccaagcggcctcccgcacgcggacgggcatggtcacgccctacgagccaaaagctcggccggcgctcctcggcatcggcgccaaggagcgcgagcagcccgagctcaagaagggcgagaagccgaaaggcgagtggaagaagcgccaggaggccaaggtctacgtcccagtcatcaagagcacgcgcgagtcgtcggtcgccggcccgtcgggcacgtctggcacgcccgggtcgtctgtcccgtcgtcgcgccggccctcgcgctcgcgctcgccaccctctcggccgccgtccagcagctcacgccgccggtcgcgttcccgcgaacgtgatccagatcgagaggagcggttgtcatcgtcgcgacgccgtgacgacgaccgctgcgggtcgggcagctcgcggcgcgacgacgaccgctatggctcctcgtcctcctcacgacgtgatgttcgcgagagctcgtcgtcctcgcgacgagatgtcgaccgagggagcagctcgcggcgcgatgaccgggagcgggagccctcgcgccggtacgaggatgaccacgagcgtgactaccgccgggagcgcgagggcgacgactaccgccgccggagcgaccgcgagcgcgatgatcgccggcgctgagctgatcctccttggttctgggcccatcgtcgtcagaaagaagtagtcatggatctgatgtcaatccgtcgtcgtcgtcctccagcttcaagtgaagcggatgacaaagtacatccacagccagaggaggcagacggcggcgaccgagccgaggacgagccacgtgttgccgcggcctttggagctgacagccgagagccggcctttcgatcccgtcatcttggtcaggttcgactcgagcaggaccgacgactgctcgagcagcggcttttcggcctcgagagacgacgcaaagtgggccgcattcttgcggagctgcgtcgacatctgtgaggggaaggacgatacgaggtcaggactagcaagctggctgcgtcgaccagaggaggacggaccatcgcgagctgctcggtcaactcgtcctggatgcgactcgtactcatcgggccctcgctgaggaccccgctgctgctgtccttgatcgacttgccccctccggcaggcgccggccgcgttcgtcgctcgcgcaggccgagctgctcgcgcgctgtcggagctctgaacgggggcggggcgtccgagaggagttcggtcgtcggtcgggcgagcaatcttgaagacggtggaggcgatggctctcgaggggggtcgggttgaatgtccgtttggaaggcaggtggtggcggaacgggtgccggcgacgaatgcagggcagccatcgtcgcatcttcggacagcgacagcggcgtcggcgtcgacggagcttcgagcagcgagtcgacgtcggcgaggtcagccgcctccaccacaagcggcgcagggacgagcgagatgggtgcaggagggaggagggtgtaggtcgggcccttgggcatctttggatcctgcgcagtttgggcacgaaggaaggagggtcaggcgcggcaccaaggaactcgaagggggagaggccgcggacggactgatgttgcgaggatgagtgtcatcgtgattttgttcagcttgagttcgtactcgtccagggtcgtactcgtcctgcagcagggaggagcgaagacgagtcagagcctgcctcctagacgcaacgaggtcgggtttggcgccgagatgggtggtcgggtcgagaggcacgaacccttctccgcgattcgtctgtccggcttccgaggccgcgactgagtcgagcaggtcgcgagcaaacttggcatcctgcaggtgaggagagcaggggtgttagcttggtctatcaaaggcacggacgggttgggccgagtgatggcgcgcagggctggcgaggcgacgcacatcgttcagcttgcggatctcccaccacggccgggcgtcgagcggcgtcggggcggcgtggacgagtgtgttgagccgggcgagcagccgagcgaggttgatcttgtcgtgcgaggacgagctcttcatggcgagaaggggacgaggcgaggttgaggtcggaaggctgcctctctctccgcctgccccgtagcgtcgtggcggcggcggcggcggcaccggtcagagagcttggatctgcctcgccttctccatccctcactgccaccatcgccagctctgaggatagctctctgcgcccgcccgtctttctccttcctccagcggccaacctttgaatggcgatccgacggtcggtgccgcggtcagtcttccgcctcgctcaggctcgattgctcgccaggctcccaccaacagcgtcggctgcggtcgtcgtcgatgctgccgccagacaggcaacaaggccatcgaagcagtcgctcagctcgcagcctgtagaagcagcagaacctgtcgcagatccggccttcgacaggctgaaacacaaggcgcgatccgagtcgagcagctcagaccaacctggcggcagcgagagtacgtgtgcacctgccgactccgcccggcgctctcaccctcatggctgaccacaaggccccgtcgaccaactccagatgctttcggtttgcccgagccgcccgttcgcgtgggctccgacgctcagacctcgacgtcctcgtcctcctcgtccagtgccgctcgcgcaggctctccgcgaggcgccttcgtcccgccgcggccgtcgtcatcgacctggaagccgttgttgtcccccaaggcccaaagctgccggtcagagccctttcaattcgactttggtgtcgatctcgacgcgctcggcatcgacctttcgacggtcccgttcaacccgtttgcggcgacctcgagcaatcgcacgaaggtcgatagcccgccgcatcgtgacctgcagccccggcgcaagcgggtcgacgactggtcgatctttggtccggctgtcgtccagccgccgttaggacgtgtcgacgacccgccccgagcgaccgtgtctcgagcgcaacatttggcaccgcagcgatcggcgcagacgccgtcccctgccgagttgttgatcggcgacggctccagcccaccagccacagccggcccttcgacctatccagcgtcatcacctcctgatggctccttctttatgggactcgctccggccatcaaggcgcacgcctcctggcgatcgaagccgctaagcgatccgggcgaggcagcggcgtcagccttgctcagctcccggcggtcgagcgccgccgtccagcgttcgacttcggtgttaaaggaggcgcttgccgccagactggccgacaagtccctcacctatcctcccaggccaacgactgatgttccgggcgccaactcgttccagacgcggtcgtcgactgccaaagcgaccggcaagaaccgcgagcgcgagctgttccccgagtcatcggctaccttcgcctatccctccccggcggcagggtcaagcttgtcctccctcgagaggtcagacggcaaagctttgattcgaggcaacgccgtcacccatcctcgcgcaccttcaccactgaggaagctcgatctccgccgctctcggtcaaaaggaccgccccgagctcgctgccctctctgggagctcgttgagctggactcaattgtcccgctggaaggcacgcctgctgctggcgcgctcgttcgcatcctcgacttgaacgagattctcgcgtcgcccagcgacgaaccacgggaggccgagctgcgatcacagcggcgcgcaacgttcgctacgtggcttgtccgcggaattcacgagctctcgcgcgcgttcgaggtacgtcgacctgccagacttactcttcaaccacgactggagcgagctgacccttgcttgtgcgcacgcggtagattggcggtcccttcgtcaccgtgcgcggccaagacgagctctgcctacacttgccgcggcagcctgccgcatccttcgggacggcctgccggttagcgtcgaccattgacaagctcattcccagcatcacccgaatcatcgtccaccggctgtcacaggagaagctcgagcccgctcaacagctggttgacggccaggtgctgcggagcgtcacacgccccgggcagggctcaatcccgcttcgaccgtcgagcgcgccggcggcgtacgtcgaggctatcgacatccttctgcgcaaggtcactcgttcgtcgtcgaccacccggagcgctgggttgcctcagccgagctcgccgccggctggtccaaagctcccaggcggccgagggccagctggcgcctcggttggagcatcgaaggatcaccggccgccctcacgctcatcatccgtcaattcggcagacgcaaccgatccttcttcgccacaatcgtcggagggtccagtcgctgccgtgccagcgacgattcccttcgcaccacctccgccagcggctttcacggccgccgccgctgccgcccatgggccactcggtcgggaggggatcaagagcagcacagtctcttcgacgatgctgccagacggccggatggtcgtcgatagcccgtggggcctcgaggtcgtccgcctgaacgagcactcgggagtcacagagcttggcaatgcgcctgtctggagcggttgggcgcagatgcgcgctagccaagaggccccgtcctagagtcgtggtccgagaggcgcatcatccatgccatgcaccctttcgctgcttcacccgctcgcgtaaggcttgatgccgaggagcgcccggacgtcgatctgaccatcgtacctccgcggcagcgcgctggcctccttctccctccgagccttcttcgccgcagcgttttcctcgtcgacgccattgtggacgagcaaccagatcttgcgccgctcttcgggcggccaggcaaacgtcttgggcgtgaagagcgccaaccgctggatggcgcagaagaggggaaacgggtcgagtccgcgctcggcgagcaggtcggccgacgtctgcagcgcacgagtcgccgacccggccgaggccggatcgatgatgttgagcaacgggacgagcaggtcgagctttgactgcggcaggatcgactggagggcataaaaggggacgctgccggccagcagcgggcacgtcgagtgtgacggcaggcctttgaccgacagagcctctggcgtcttgagcccctcctgcagctgtggcggcaggagcacattccgctcggggccggcaaagaagctggccatctcgtccggcgcaaagcggatgtcgaggatcgctagggatttcgaccggccggcgctgtcagtcccttcacgcaccgcctcgccctggcgcagacggccgagctcgtcctggtcgatcgatcggaggagtttcgcgccttcatcgcccgcagcccggacgcgctcagcgaggaggaaggcctcttgcaagatgcgatcctggagttgatgctcgacctgcgcgagcagcgcgagagggacggtcgccgcaccggtcggtgagctggcaggcgcctggggcgcatcgaccggccaaaagttcgaatgcgggaacgagttgagacgcgcgcggtctgatgtcttgggaccagcgtctgcggcaaagagagggacggtgggacaaagtcagctctggcgagggaggacgtcccgaccgagagtgagggctcaggacggaccgttgctccctgcgatcgatgcggaggacgttaaggcgcgacgtcagccctctgttctcgacgcacagccagcggcggaaccaatctctcctcacctgcgaagtactgcagggcgatgtcgcagcagatgatcgacagcggcggcggcggggcgatgccgttgtctgccggaatggacgccgcccagtctggatgtaggatcccgtccgggacgacgaccatcgtctccgacccattggggtccttcggtgttagtctcgcatgcctaaagttaatgaggaggtctgcggcggaagtcgttcgactatcagcgtcgccgtgcgagtcagcgacgtgagaggaggcagacagactctgtggcattctgacgccggtcgcgatacacagcgctgagggtcccgacatcatccgagctgatgaggatgataagcagagggctctgtcagtcggatcggctcggctttcgctgagcaggtggtcagagcgggtacgtaccccagccgtctgtccagagctcgcgcaggcgctcctcgtcctcgacgccgaccgctcggccctgctcgagcacttgactcagccgactaccgagcgctacatcggaaatgatgggcggtgtcgtctcgccagcgtccgatgctgatgaggtaggagatgccctcctggcccgttctcgaagcagcggcgaaggaggcagccggccaggacgcgacttctgctcctgccgcatggaggaggccgcggctggcggtgctgatgtcagcgagctggcagcgctggaggcgaaggtggagttgcagcgacaagcggagcggagcggccgaacggccttcggcaaccgtgcaggccgaaggaagggcatgccgtcgaggagaggcggttgaagagggacggagtttgccgggccgacggaggagcttgagctgctagcctcaaacgacggatctcgtccgtttttgcaccggtggaaaggctcggagaagacggcgctctgctgggtcgacgctcgtgccagaggtgatagctagaatgagaaggtcgtgcctcttgcgaaggggagtgaagctagctagtgatcgtctggcgtcagcgaacgcgatcccgtctcgagctcagccaggagcgtcgaccggctctgcctcccttaccctcgacgccaacctcgcatctgaccccaaggtcgtgacccctgcctaccgagcccgcagtcgacccgatctctgtcgcccttccttgcgtccagaatcccgttggacgatgatggcgccgccgacgccgcagccgcagccgacggcctcttcgagctcgagctcgaccgtcaagcactttgagcgctactttgcgccggccgaggtcgagcacctgacgacggtcgcccgaggcaagcagtcgatcaagcaggccgagggcacccgtctggcggcctgtgcctttggcgaatttgtcggggctcggctaggcttgtgagttcggcttacccaacactcctcggcggtcgacccgactgaatgactgaccccaccctcgcacctagcccgagacggacgatcgcgacggcccagctgctgtaccatcgctttcacctgttcttcccgctgaaggacttcccctcgtactacgagccgatcctcgcagcgctctacgtctcgtccaagctgcacgacacgctgaagaagccgcgcgagatcgtcctcgccagctacggcgtccggtatccagacctcctcggcggcagagcctcgctcagtgagactgatatcgaccctgcagtgcgtactcgaccgcttcaagccccgctggagcggcccgcggcttgtctctcgaacgtccgcgttcagcgtgctaacagtcctcctcctcaccccttccttcacagacgctcgaggccgaccggctcaaggtccttgcgatcgagcgccttgtgctcgagacggtctgctttaacttctcggtccagacgtcctttacatttgtgctccgcttcagcaaggccctgggaggtgcgtcgtcgtcttctcggtaccgagcgcgagtcgctgaaccgatcggctgactccttttgcccatgcatttaaaccgcagcgagcaaggccctttcactagcggcctaccggatagccattgactggtgaggatcggtagcggtctgtcgcgtcgaccgcttggctgacttgagtgcctcacttcctcctagctaccgcaccctccttccgctctcgtttccgcctcacgcgttggcgctcgcctcactctacgttgcggccctgctcggtcgcgccgttcctcaaccggtcgagggcacctcgctaacggcggtcgaggagcgggccatgatgatggagcgcgctcgggctggtgcaatcgaggaggtgcttgcagcgcccggcgcatgggaggagcgtttcgctgtctgtctgccagacattgagcgtgcgtctctgagcttgttcagcgctttcgtaccgcagctactgaccctcctgtcgtacctgcagagatcactcacagcctgatggacctgtttgtcgactgcgtcccgatggcttcccggccgagcaacggcaccccttccacgccgtcgcgcgtaccggccctgaccccggaaggcgacaacgtcgatgagataggctccagcttctcgacgacttgcgtccggttgctatcgctcgaccggcggggcggcgcggagctcacagcggtcaagattgagctccgtcggagagcggcagcgcgggtcgaggccggccggcccgccgacggccgaaggttgacgacgtcgctcgatctcgcccggcgagaagctcgggagcaaggcgaaggtgtcggtcggaatgagggcacggtccgctttctcttttcctgaggtccgccttgcctgttggtgatccgcgccgcctcctccccggtcggcaaccacgactgacctagtcaccttgccccggcagtatcatgagtcggtcgtcagcagagacgatcactcgcatcgagattaagagagcagccagcatcggcaaaggggtattggggagtcagaacgcagcgatgaaggggccggcacttaagacgcagaagggcgtcggcggtcggtgggcagggacagaacgcaagagagagtgaagacatagatcgagctactccttgtcctttcgccggccaaagagccgggaggtcgatggcgagtcgccagagacgctcttgcgcgagcttttcgacggcgaggccatgatgaggctcgtccgcgagccgttcggaaggctgctgagcgaggcgccgttgacgacgggcgacgccggcactgagggtccaccctgcggccggaaggccagcctgagacgaaggatgccgctctcctggacctaattggatgtgcgcagagtgggtcgatgtcagcttgcattggacgaaggttggaggtgcagcgggccacgcactgcaacctcgacgtcggcagtcggggcagcggctgagatgtgctgccagatgtcgacctcgccggtgccgaccaacttgtcctttccaagcgtgtggtgctcgtagaggacgacaccgagcgtcgtgatctcgggcgtcagcgaaaagtggagggcatcgttcctgtccgtccgggaagggtggctcgggtcagcgagccgactcggctgcctactgcctctgcccggaaggagggcgcaccactcgggcgtcgacgacttggccgagtgcttggtcttctgcgtcttgtggccggcggttatggcgacctcggcctttgcctcgtcggcgagatcccgggcagagaagaccgtgaccgtcagggcgccctcttgggcgacgccacgggggccggcgagcgcgtagtcggtcgacgagacgatgcccgtcgcaccggtcgcgtcgtcgatctcttcctcgacgagctgcggcgacaaaggaacgaggggatcagccacaaagacaactctcggccgatacgtcgcactgacaatctccttgcccgacttgtccttcttcttgacgagaccaatcttgcgcccggcaaagccgccgacgtgtccgacgccgtggccgaccatgccgacgcccttgaaagcgcccttgcctgcagcgccggcgatgccgatcggcgcgtgaccaatctgtgtcatcgcccggcctgcggtcgagaaggtcgacgtgttcttccgggcccgagcgatgatggccggctggaagttgagacgctggaggagagggcgacgatatgggtcagctccggatgctaggacgaaaggagacgggtgcgtgcaaggttgaggacgcaccacgcggacccagcccttggcgccgtccttgctcgagacgaggctgatcttcttctcaaccgactcgaatggctcgagatcggcgagattgatgagcccggcgccgagcgacttggccgtctcaagcttgttgtgatcaaagacttcgacctcgaactttgccgcgactcgcgagggcacattgacatcgaatgactcgttccagatcggggccagcgtcctgcgcgagagagaaggcgtcagctttggaaaggacgaggatgtgggcccagcagaagacctactttcggacgtccttcgtcttgaggaccttctcgccgttgaaggtcacgacggcgtacgggtccgacttgccggaccggtcggccgcacgcagctcgccgccgtcaatcacctcgacgtggaggatgccggcattgttcgccgactcgcgcggttggaggacgatgtcgactggcacgagtcgcgcgcacagtttgacgacgctcttgcggccggagccgtctggcgcggtgagcgtaaagtcctttggcgcgttaaggcactcctcgacgagccgtcgggtgtcgagccgaagctcgccaaagatctcatcctgcaggttcggggcacgagcggatcggggtcagcgacacagcatgactagagcgggctgcaagacctcaccttctcgtcctcgtcgttgccattgaggcgcaggcagacccggctgagaggcagctctttgacaaaggcctcgccgacctgatcccagaccgtgtggtggccgcgagccttgaccgtgctgaacgcaggccagtagccgtcgtcgagtaggatctcgaaccggccgcgcttttccatcgtgccggagatgacttggacgacgagcaaagcggcaggtgcagccagcagttcctcgcgcgacatctcgacgcccgaagcgacgtcctggttggctgtcacctcctcgccgtcgatggcggccgacccggctgacccgtcgactccaagcgggcccgcctctttgctctcaaacgagacgccgcccttgaggttgacggccgggcagaactcgacgtcgtagtagagcgtgcccttgacggcattcttgccgtcgaggcggatgccgtcctgcttattcttgatgccggtcgaagcaaatggcgtgcgcttgtcctcggtcgcgaccgcgagctgattgatgtgcacctccacgcttccgaggctgcggtcctctgcagtcgagttgagcaagaatcagcccggcgcgagcgacggagagaggagctgggtgacttacttgtgagatgctggtagtccatgacctcgatcaccggccggtcgcttagcgagtggaccggcacgtaaacgtactggtcccactcggggttgaggtctgcgcgaaaaggagttcggcctggttcagcgatcatcttcaaagcaaacggagaatgcggcaagagggtctgactgttgttgacgacctcggtccgcgcgagcgtcgtgccgtggcacaggacgcggacgtaagggtcgctcttgccgccgaggagagctgggagatgcagggaggagcaagattagcaagcatgctgctgcagcagccggaagaagaggagtctgcgtaccttcgacattcctgaggatgaagcaacagaggctcgggtcaatcgcagaatctcctccggtacccgcaaaccgactcacttgacgtcgaccgccttcttgaggaggatgcgaaggatgccgattggagccgtgtaggcgccggcgccattgaccgagccaggcaaattaagcgccttccactcggctgaaagccggatgcggcctgtcttggcccgagcgagcgggaaccagtcctgctcgcgctccttggccgtgaagaggtcctgtatagggccggcttcggttagctgtctcgcgcaagtaagggagccctcgacagaaaagcgcaccttgagcgacacggtcacatagccgagcgtcgggtccttggcaaagtcgcggtcgtcgatgacgcggacggtgatggttgccgagtccttgtccgggacgagaaactcgtacgagctctcccaggcgctgaagacgagagcaaaataagagagtcaggggctgggagccgcccgccggtgctcgcagctacgactcacggctggaagttgttcttgaagacgcccgtcttgtgcgctggttcgcgctggccgccgataaagagcttggcataagggttgaccccgcctccgccgataccgatgagtcggctggcgtcaaggtccctgcagcaaggttgggtcagggacgcagtctctcaagacctcgagacgccgccaaacgcactttgcctggtggattgtgatccggcagatgccgctccgcgtttcgggcacggcgtcaagcgtcccgtcggcgagcttcttcggctggaggactgggtagaagttgatcgaggaccggagctcgcccatcgtcttgccggccttgaggatcggcagcttgagatcctcctgctcggcatcggcctggagcgacgaaaggtcaaagttggcgacgccgagctcggtgtccttgcggtggtcgttgaagtccatgacggtgagcgcgagggcgtccgtcagggacgagacgaggatgtactcagtctaaagcagggcgggggaaggaggtcagtcttgtcgacagtcaaccaggagacggtcgggagaccgacctcgttccactgcggattgtaggagctggagattgacttggtccgcgcaacctcctgcttgccggcgatggcaaggcttacataggggtcgggcgcaccgccgccgagcttggtgctcttgatgccccgagcgctgtccagcttgacctcgaggacgccgatggccgtgtctgtagcagcgggttgagtcggtcagctcgcaactacagcaggagttgacggcggaggaaaatggacggaccgagcggcgcgccgctgagcagctgctcgaggttgagagtaaagacgtttggctaaacggatgtacgaggaatggggcgtcagacacaagggcgtcgaacgagcgacacgagaagggctctgattggcagacgtacgtcgtacatcatcggcccttgggtaggaggagcaccgggcggacgatcagccaacgcaagaaggtaagcataagccagtgaggaaagaagagcccaccgaggatcgagtggaccatgtcgcggataaagcccgagaggcctgggatgctggcaatgtcaaagccgagtgtctcgccgccgagcggcttgaggacgtagtcgaagtggggcttttcgaggaacgagagctcgacgagctggacgtgcggcggcttgttcatcagcttgagcttgatgcgcatgttgccggtaaacgtcatgtcctcgagcagtatcggcagcggggccgagatgaagcccttgccgatcttgacctcgaggacaattttggggttcgtctggaactgggcctcgcgcggcgtcacgtccgacaggtcggtcggcgtgaacgagagcttccagtccatgatgacgacgtcgtcggccgtcttggggaacgtccggacgctgtctatgcttggcgctttggtcccgagcgtaaacgtcgtcatcttgatgctctcgaggaaagccggcgtgctcgtcgagaggacattgtcgaccgaggcgacgatcgtcgctgacaggaccggctcatagattctccagaagcggtcgaggaagttgttgatccagtcggccgactcgtgctcggtcacgagccgcgtcttggtgagctcgcgctggatgtcgtctcgagccgcccgccggacgcgcgccatcgacgtcgtgtagtaagtcgcacagatggcgcttcaatggaacggcaacaattcgtcagtcagacgtccacagtcagcggcagagagaacgacacgcacaggaggatgacggtccagccgagcccgaagcggaacacggcgagaaagtgcgaggccgagatggcgaagaagatgacgccggcgttctggtaccaggtgccgtacgactgttcggacctggctcagcgtcggttgaaggtcagtcgaagccctctgacgttcaggcacgccacgacgtacatgaactcggccaggataccaaggtcggcctgggcggtgccgtcgctcgggacgccgtcgataccagagacggagcgccagccgaccttgtaccaatcagggataccgtccgccgggagagctgtgatcgcgcccggaacgcccgcctgtcggacggtgacgagagatggcggtcagtcggaggggtcgcagagaggctgcctgcggaactcacggcgccgaccgtctcgacctggggtgcgacgggcacaggcacggcttcgccattctcgcccttgccctcgagcctgctcgcccggtcaatgtcgccgatggtgacggtcggtgccgggccagggccggtcgaggtgtcgagcttgagcgctgcgcgaagggaacggggcagccaagagacatcaggatccggtcagcccggggctattgagctcaggccgggcactcggcgcctcagacgactcgagcaacgcacactgagcgccgcccgtcttctcgccttcgccgatgccgtggtagcgatgcggtccgtccaggtgaagggccttgccggtcgccttggccttctcctctgggcttgcgtccgggtcaaacacctggcgagcatcgcaacgggcctcgggcgtcagcacaacggcagctcgtcgtcggcttcgacctacctgcagagcgctgatcgccaacctgcgcgtgccatatcgacgtgatcgtggatggcgggcccacaggccgggcgaccggaagcagcggcttaaagaaggcggggaagggggactcaacgtgtacggtcgccccgcgctgggcgtcggccgcgatgacctgctgctctgtcaagatctcctttggcagggcctgctcgggaggcgggaggccagcgctcatttccggcaaggaaggagctcgatgggtgtggatggtgagagaaagagggaagatggtcggtcaaggtcggagggacggaggcgctgtcaggctcaaagcgggctggcacaacacgccccgcgcagcagcccagcacaacggccgccgtctccctgcaggccaacgaaaaaccggtggccagcgttgcggcagaacgtcatcgcaagcagatttcctcgccgcaagccccggcgttgttcaaacggtcattgcaatgccctcgggctggccgggaggccgagtcgatttctaaggatggagagggcctgcgtctactcgtcgtcgtcctcgtcgtccgaggcggtgatgtgctgaaagggtaaggaggtcagcgacctgggtcggccgaggcaggaaaaggaagaagcggcgcacctcgtacagcggctggacgctcttgaggaagaactccttgccctggttctgagcgggcggcaagggttcaggaggggagggttagcaccggtcttgtctgccgccagcccgaagcaagacaaactttggcacccttctcgtaccagtactggatggcggcatccgagaccaggtcgagatcccagaagatctgccaagaggcgaggagggtgtcagcgcaggagagcgggcaggcagactgggcagcagcggccggggacgcacccggacgagcgacgggaaggccttcatggctttctgctcgtcatagcagtagacctggatggcctggagcagggtgacctgctccatcggcttcttgcagaacggcgcgaggacggggccaaacgacttgacctggccgtactgctccttggagccgctccagtcgagcgtcgacatgaaggcgttgaaggcgagcgcgacgacctcggtcgacgggatcgagttgtccttctgcgtcgccgttaggttcgcgaccgtctgcgaatgggcgagcggaggcgcgtcagcacgctagccgcaggtctacgggcagggaagatgcaggactcacagcctcagtccactcctcagagtaggcctcgtcttcctcgaccgagctgacgacaaagcgcgacatctcctccttgacgagcgtcgcgacccgcttggtgtaccactcgccgacaaaggccatgttgtgcgccttgaagtgggcctcgagcgcggcccggttcttctggccggcggggaagacgtcgaggaggtccttgagtgccgccttgagcaccttgagcaggtgctcttgcgaggcctgggtcaggtaggcccggcagaagtcggtgaggaagttgagcgagacggctggcggggggggggggcagaaacaccagtcagtcgctgcaagcctggagagcaccgaaagagaagggagactgaccgtccttgaggaggtgctccttggtcaggttctggaagagctcgagcgaggcgaaaccctgggcgatgatgagaccggccgagtaggcaatcttctcgcgctggaggggcgtccacttattgatgctgaggtgtggcgcaaagcacaaggtcagcgccgaggctaggaacgacgagccgcaaaacgacgcactactggacaagcgccgggaggacgttcttctcgaggggcttctgtaggtacttgtacctgggcagcggacgagaaagtcagctgcagcgctctccctgcgggacggcagagccgcggtagggaagggggactgaccgctggacgacttttttgtagacgtcgaccttgatcttgacctcctcgatcagggccttcttgtcggcctcggccccgaggctcaggccctgcatctcctcgacgccgccgacgatggcaaacgagctccggagcgcctcctcctccttgtcgatgtacgacccgcccggctggagcaggccgccgacgagcagaagctcaaagaactggtcggcgtacttcaggtactcgagcgtcgtgccggccgtgatgagcttggtcgctacgacgtcgggcgaagccggcgcaggagggaggagcgagaggagcgcatcgcggaagactgatagcagcagcagcagcacgggaaggcagaggcgtcagctgctaaactcgagcagagcaaaagcaagccagacgacgacgcactctcaggctcgaacttggcgttggccttcgcgacacctttcagaagggcgaggagagaaggtcagcctggccatcatccgttgagctcgaaggggaaggagggctggcggactcacccttccgctgcttgttgcggactccaacgagggagggctggcagttgatgttggaaagtcagctctgagctcgccaacagatgtccggcgagagcaggccaggacgcaccttctggttgcctgtagcaggagtcggtccgggggtggtcgtctggtcgagaccgaggggcagggacaggccaaaagaccgtcagctttgatccctttgccagcggataccgtcgccttctaaggagagcaaggcgcaccatgcactagaatgaacttctctagatgtacaagaagaaaagagggggagattgagtggtggtggtggggttggagcagagaagggtcggaggggaggagcgtcgagcagctcgaccctgccgccgccgcgacaaggaaactcgtttggcgccagcgtcgctcgtcctgaccgtagcgcaaggatgcactcgcaggcgacgactcaacggggcgattctcttagcagccaagcaccgcctactgatcctgacgctgacgagggtcgtaaaaggtcatgaatggtggggcagagctgtctccctgggggcgctagcgcaccgacacgggcggcgggacgagcgggatgctgctgagatcgaactcggtcgcctcaaacgccttgcggacgagctcgggcagggtctcgagtttcttggcctcgtccgcccacgggtcggcctgcgacgcggaagggccgctgaggccggtactgctgccgaaggtgccgccgccagcgccagcagagggctgcccaaacgaagacgtcgtcgagggcacactgccgaatgcggatgagcttagcggtgcaccaaaggccgaggcggtgactggagctgctgctactgctgctgctaacgaggcggcctgaccgaacgctgtcgttcctgctggcgttggctggccaaaggccgaggctgtcgaagcgggctgaccgaaagcggctgatggcgaggcagcagcctggccgaaagcggatggttggccaaaggcggaggcgccgggcgtcgaaggttgaccgaaggccaatgtcgaggcgggtggctggccaaaggcagaggcgttcgccccgcctgctgctggctggccaaaggcagaaggcgcggcggatgccggctggccgaaagcagacgctgtcccgaaggcagacgtccctgccgccgctggctggtcgaacgcagatgaaattgaggtggcaggctggccaaaggctgatgtcgttgcaggcgcctgaccaaaagcgcttgacgagccgaaggcgcccgtcccgctgctgctgccaaaggccgacccagagccggccgctggcgtaggcgctccaaaggccgaggtccctgacgtggatccgaacgcagacgggccggataacgcactgaaggcggacgtcgtagacggccgagctgcgccaaacgccgacggttgaccgaacgcagacgatggggcggccgctgcagaagacgacccgctgccgccgccgccaaagatgttgggcggtgccgcagatgcagacgcgccaaacgcgccggtcccagcagcgctgccaaacgcagacgacgagcttccaaacgcacccgtcgccggcgccgctggtgcgccaaaggctggcgggccggctactggcgcgatgccgctgccggaggcgcgggcctgcgcctgctggacgacctgcggggcgctctggtagagctgctggaaggccgtgttggtcgtgttgagaatctgctgctcctgctgcatctgcgagagggagagatgggctctaggtcagcgaaaggcgtgacgggtgacgtgctgccgttggaccggggagactcacataggcttgctggttgcctcccgacatgaccgacatcatccggagctcctctggactgaggtcctcgccctcgacaacgcttagatgcccgccaggaccatatgtcgacagccggtactgcggccggtcggcttcgagatccttgtagacctcctcgaccttgaagttgagcggggccgccgccgccgcccctccggcagctgccgctggagcgctggccgaggcgggctttgcaccgaaggcggtcggcttgctgccgaaggctagacggcacgaggcgtcagctgggggtcagcagcgagacgccgacgaaacggagaggacgaaccactgctgcctgagctcgatccgaacgcgctcggccggccgccgccgccgaaagctgacgtgctcggcgcggcgccaaacttggaccctccaaaggcgctgttgaccggtgtcgagttggcgccgccaaaggcgcccgtcggtgcggacccgccgccgcctccaaagccactcggttgccgagctgcaccaaaggcggacccgccgccgccgccgccgaacgcgccgcctcctccgccaaaggcgctcgtaccgccgttgacgccagcaggcttcgcaccgaaaccgctgccgccaaagaggcccagtccgcccgcaggcttgttgccaaagcccgtcccgccaaagaggcctgcgccggacggcccggccgagctaccgaacgtagagcctccgccgccgccgctgccaaaggctgagctgccgaatgcaccgccgcccatgagagcagcctcacccttgccctcgagtccggttggatgctcgttcctgcagttgccgccaaaggtctgtcagaggggaggacaggcgtgcgaggaaagtcagcgcaggcgcgtcggacgagcgcaacgaggcgacgcacgcagcggccctgaaggtagaatttgcagatggcctggcgggagaggaggggtcagcgcgaccgacgtcttttgagccaaacgcagctcgagggcccgcaccatggcggcgggtggcggtcgttgagtgctggtcgtcgacggtcgaggttaggtcgagatggtggtcgctgcgggcgggcggctggggcacggtcgggcttctctctgggctctcgagatttcagggcgcgcgcggccgcgggctgcgcttcgtcggccgttgtcggcagatcgcagccctgactcttcatcatctcgactcaaatcgctcttgttttgaaaatgcccatgattgcgacgatgcccccccgctgttaaggagacagtcgtcgcgaggccgcgtgaggggggaaggggcctcgtatgtaaagaaagcccctgctttgtctcgctcgccgtcctgcggccctctggcggccgccctcgctccccttcccctcccctcctccgcccaacaccagatttctccttccgttcctccacgacgtcgcgcgcgctgcaaatgtgcgcagcgcgtttactggatcatgccgcggcccctgggtagatggcagagaaagagggtcagtcgggctgtgctggagagccataggctggtagctgggacgcacttgtagccctcggaagagatgccggagatggggttgatctgtacggggagcagtggaacgggcatcaggttccagctcgaggagatgggcagcaaggagggcccgccaactgacgttcatctccttgagctgctcgttggtcgcctcctgccactcgagcgtcatcgaccgcgggggcgggggcgctgccagccggagaaaaagccgtccttcgtcagcgctcacgatccgtgaagaggctgctagggagcgtcagggccgcaccaatgtagcggaagaagttccagatgatgccggtggcgaggacgccagcgacgatgccctggaggacgacccagttctcatagctcgagctcttgggccggcgggcgccgtagtcgccgtaggcgatgtagaaggctggagggcaaggaagaagacagacaagggcggacgggagaggtggtgtacgaggcaagcggtcgagagcggcagcagaggagggcggcgcgttagcccggccgttcgccgcctgagttccgaaggagcagctcgcgctcaaacgacaggacccgagtcgatgacctgccgctcctccgcacgagctccgagagagggagaaagacgcaccagccttcttctcctcaaggctcatggccttccagtcctgcaacagcggcaaaagcgagggagtcgtcgtcagtcggccgcctcctccaagcgagcccaagtaaggaaacgtacaccgtcctgggacttctggagcatctgctggacctgaaccttctcgtggagcgctgcaaaagcaggcgagaaagggtgcaaggaagcagcgaaaggcagggcagatgaggcacgtcagtgcccgcgggtcgaacccccccatgaccctccgaccacctaaacgaccggaagtactgcagggacgtacggacagactcccactggtcctcaaggtgccgaagcactgagggggtggcgtttgtggtcgtcaggattcgcgcaggagcggcgaaggaccgggctccgaggagggagggggtggccgtcgaagcgcggagcgtcgaccgggcggccagcgaggcgcggaggaaggacatgtcgaaaagaggaggagaggaggaaagactgagtggtggtggtgctacgagagcagagactggaggggtcgaaagggcggaagggggttagggtcgacggcgaagaggagagaaggcgaggtgaggagggcttggacgagcaggccggctggcgaaccgacctttttatttttctcccaatgcgccgcacactactcgcgcagggctgccgttggctgcaaagaactattaaacgtcctgaagctcacgacactcggacgaaagtagactaagtccagaggcaggaaggcgcacgcaggtcaagcgtttatagcggacaaagcacagacgagagggtatgtcttttgcagaagcgagcgcaggccgatggccgcccgcggttagcagcagcgacagtgcgctgacgtactcggtcgaagaccatcaactttctgcgaggccctcgacagtggcagatgggttggcagaggtggacgctgcgaggttgcgataccgggggcctggagtataagagcgagcaacgcgctgcggccgccggccgagagcgtcagacgcgagagatctcacccgtcggtcgacgcacattggtcactctagattgacgccagccttcattgtgacggctgcaggagaagggtagtacccagagcagagagactttggtccagcgccgccctgcattgctcgaacgtccagctcgacgtaaagttgcggggagccgagcgtcgcgttccgacaaggagcaacgcaataccccgctcaacccgccgtcctggcagtcaggcaccgtcagtcagtcagcccgtcttctggctcactcgagcagccggcgacgtactcctagcttgccgagtggaaaggaaaggtcgccgggcctccttggccggccggctgctagacccgccgcacagcgcggccgtctgcggatatcgtgcgtcagatcgaaatggtcggcgccaaaagtccggtctgtcagtgttgatgagcaagaagtgtcagagggtcagccatcccggccgtcgtcgtgatgtgcgtcaagtgtcgacgggctcgcgaagtcgttcgagggcagggaggcgatcgacgacattctccgctggcgcgccgttttcgcgcgcgcgcggcgcgagcattcgtcgtccagagcgactctctccaccaccccgtttcttcctcctttcccttccctcatcagagccctctctcggtccttcccgacatggtcaacgcgaccgatctctttgtgctcgccctcggcggcctcctcaccgtcgccttcctttaccgcgaccggctcccgttcatcggctcgccggcaaagtcggccgtcccagccccaaaggctgcgaacggtgttgccgccgccgccgccctcggaggctaccagggcgacgtccgtgactttgcggctcgtatgaaggaccaggtgcgtcgattcccattctcgatcgggggtcggggtttgtggcgaggtaagggcaggagggagcaagaggcgggaaggcggacgcgtggcctctgggctcgtctcgtgttgctgcgccggggccaggcgtgtaggacggtggaagggctctttgcctcgcgaggcaggcctgcgtcgaggagcaggacgaacgatggtcgaagctatgggtcaaagcaggagggcggtggccttcgatcttgacccccgctgaccacccgagcctgtttcgacccttgctcgtgcagaagaagcgcctggccgtcttctacggctcgcagaccggcacggccgaagagtatgcgacgcgaatcgcaaaggaggccaagtcgcgctttggcgtctcgtcgctcgtctgcgacattgaagagtacgactttgacaagctcgacgcggtcccggccgactgcgccgtcgtctttgtcatggcgacctatggcgagggcgagccgaccgacaatgcggtcgcgttcatggagctcatcgaggaggacgaacccgagttcagcgacggctcgtcgctcgacggcctcaagtatgtcgtctttggcctcggcaatcggacgtgcgtgtcgtccttcctcatccaccagctctgcggcgcccacggacagccctcacctgacccgcttcctccacttgaacaggtacgagcactacaatgtgattggccgcaaggtcgatgctcgtctcgccaagctcggcgccgtccggattggcgagcggggcgagggcgacgacgacaagtcgatggaggaggactacctcgagtggaaggacggcatgtttgtcgcgctcgcggcctcgctcgggctcgaggagggcggcgtcggcgagacgcccgactttgtcgtgaccgaggtcccgcagcacccgctcgaaaaggtctaccagggcgagctctcggcccgcgccctgctcggcacaaagggcatccacgacgcaaagaacccgttcccggcgccggtgaccgcttaccgcgagctctttagcaacggcgagcgcaactgcatccacctcgagtttgacattaccggctcgggcatcacgtaccagcacggcgaccacgtcgccgtctggccgtcgaaccccgacgtcgaggtcgagcggatgctcgccgtcctcggcctgtcggccgctgaccggcgccacacgcccttccaggtcgtctcgctcgacccgacgctcgccaaggtgccgtttccgacgccgagcacgtacgacgccgtcttccgcaactatgtcgacattgccgccgtcgcctcgcgccagacgctcgcggccgtcgcaaagtttgcgccgaccgagcaggcgggggccttcctcgcccggctcggggccgacagggcggcctaccacgcagaggtcgtcggcggccacctgacgctcgccgaggtcctccaaatcgcggccggcaatgacatgacgcagccgccgacggcggccaacacgaccgtctggccgatcccgtttgaccacatcgtctcggacgtccatcggctccagccgcgcttctactcgatttcgtcgtcgcccaagctctacccgacctcgatccacgttacggccgtcgtgctccggtacgagtcgcaggcgtcggctgctcacccggcccgttgggtctttggccttgggacaaactacctgctcaacctcaagcgcgaggccgagtcggccacggccgtcggcgaggcaaacggcaagcagcaggcacccgagcatgtcagcccgccgcgctacacactgacgggcccgcgcgggctctaccatgacgccgagtcgcgctttaaggtgccgattcacgtccggcggtcgaccttccggctccctacctcgcccaagatccccgtcgtcctcatcggccccggaacaggcatcgcccccttccgaggcttcatccaggagcgcgtcgccctcgcccggcgctcgctcgcaaagaacgggccggacgcgctcgccgactgggcgcccatctggctcttctacggctcgcgtgacgcgagcgacttcctctacggcgacgagtgggacgcttacggggccgagctcggcggcaagctgaggatgcacgtcgccttttcgcgctcgggcccgcgcaaggccgacggcggaaagacgtacgtccaggatctcctctgggccgagcgcgcgccgatcgccaaagcgatccttgacgagcgcgcggccgtctacatctgcggcgacggcaagcacatggcaaaggacgtcgagggcaagctctgtgcgatgctcggcgaggcaaagggcggcaaggccgaggtcgagggtgcggccgagctcaagctgctcaaggagcgccagcggctccacatggacgtctggagctagacgggcgccccgccccttttggacaaacctccctctccgttgcttcttctatcgcacccttccctcaccggttctgcttttcctttcccctactctcttctcttgctgctcgctcccacccctgcttccatagacgtgtctccatgacgcccctccagcctgctttgcacgcccgccgccgtccagcccaggctcagaaaccaacaggacgagagcaaaagcatcgagccatccccttcctccctcctcccctcccgtctgcctgcccgcccgcccgcgcgggacgctaagcaaacaccttcttgacctcgagctcgtcctccggcagcgcctcgcgctggccgacgacgcgcgcccgcttgtcctcttcggccgacttgcgctcgcggtactttgcgccggaagccttgttagcggcgacgcgctgggcggcgggcgtgatgaactctgtacgggtgggagggcaggagggcgagttgatgatggttcggagggagaggtgagtgggctgaagtgccggcggcgcgatctcgaccgcagcttgcgtgccggcgtcaccgcagccgatcaatcggttcagccgacctttcaacctctcagcgaggcggagggaagacaagtctggcaagtagacatgcttgctggcattgccgagcgtggtaagaatcagaggtcgctggcaggttggtgaggtcagcctgtcggcgggctgcgcgaggcgatgcgccgcaacgagggaagctctgtccaaccgaccgacgacctaagagagggatctgccctccgacgcatgtgaaggacgggatcggcatgccggagcgctaataacgaggttctcttctgggcagcaagaaagaaggctcgccgcggcatggtcggtcgacgcgacggagtccccgcgggcccgctcttttccctgttcgacgcgccgcgcctggcgcgctggttgcggagagcaggcgagtaccgtctgctgctgttcggaggggcgcctcgtcatcaggagagcgctgcctacacgctgcacgaggtcgtcgtctgccctgctagcctgctgctgctgctgtgaatgtccagcttctgatgcagaaccgacgactcgatggccgtcacttttctacggcggggtctcccgcgggcggtcgcctggcgagccttggcgggcactgcgcccgctctcgccccctgctcatcccgcccttgtcgcactcctctcctcttcacacgccagcaaaagagagcgacagacaccgccatggcgccctccagcaagccgccgaccacatcatacgccttttctcagccaggcatcgcctccgtctcgtcttcaacaagcgcaagcagaagcccctacggccagcaccagcagagcagcagccagcagcagcagcacgcccggaccgactcgtctggtcgctcgtcggccctcccagtcagttcggccaccacaggctcgtcctcgacgacccacctccttgctcagcgctcggccgcccacatccccttcagcaacaacaacagcaacgtcgacatgcccggctcgtcgacctacagcccgcgcgccaacggcggcggtggtgccgcccctctcctcgccggctatggcgccaataacggcggcggctcgtcgtcgtcgtctatcaccggtggcggcagtaacggtcgaggaccattctacgacccggactttgagcgtctggttgacagcacgagcagccgcggcggtggtgcgggcggcgcctatggctcgcgcaatggctcgttcgctggcggcggcggtagcttcccaggcgatggcggccgggggtccatctcgtcgctcgggagcgtcacctcgatggggtacacgcctcgtgcccaggtcggcatgtacgacgctggctcgattgcgagccacacgtcgtcgtcgaccgtcggccagcaatatgcgcttggcggcgacccgtcgcagtgggcgcgctcgggctcgcctgagccagacggtcggtcctctttcttctccgtcctcccttcctacaactgcctcctccttcttccttactaggagagcggggagtggacccacaccgatccttccctagccattcacctcgatctgccgccttccttcaccctctcgaagcgccgtgtgctgacctcacatgtccttcgcacccggaccagactacctgcacatgcccgacccgaagcgcgaccagcgcaaggaccacggcggctcgatcctgacgctccgagggctcatgaacctcggcacgcttctgatcctcgccctcgcgctgttcatgctgtttgccggctacccgatctttgaggagctgcggaagcgccagccacggacgctcggcgccttcaagtaggtcctctcctctcgacgtgtctcaagggctacaaggaaagcttgctgaccgtcgtctcgcacctgcagcctcggtggtgtcaatgcttccgggcaggtcccgcaggtgattggcgactttggcttgagtacgtcgtcctccgcctcggttgtctcctcctttcttccattttctgacgcttctctgctctcgcgacacttccatctgctctctgctcccgcggcgcttctctctgctcttgcagttgacaaggacacgccccaggcggcctactcgattgtctcgggcgagcgcacgacttgggagctcgtcttctcagacgaattcgagacagagggcaggaccttctatcccggagatgaccccttctgggaagccattgaccttcatgcctggggtacgaatgatctcgagtggtacgacccaaggcagtcgacaacgaccggtggcaagctcgtccagacgcttgagaagcggccgatcaacgacctcgattatgccggcggctcgatccaggtgcgccctacgctcaaaggcttcctcctcgcggtgcctcgctgatttctcttttctttccagggctggaacaaattcgtcggtccccctttcgtcgctctcgcctcgcccctcgaatttgctcactcgctgaccccccttgttctacgccgtctctccctctattgtcctccaccagtgtttccaggtgcgcaatcgctaactgcgccgtcgggcttctgtccctgcttctctgacctttgcctttgcccccctccccccctctcgcgccaacccagggtggtcgggttgaggctagcatccggttgccggggtcgccgagggtcaacggactctggccggctttttggacgatgggcaatcttggccgggtcggttacggtggcacgctcgagggtacgtggccctactcgtacgactcgtgcgacgtcggcacgctcgccaaccagacgctcaacggcgagccggctgccaacctccgcaacggcctcgacgagagcaccgactatgcgctctcttatctttctggccagcggctctcggcttgcacctgcccgaacgacccgacccacccgggcccgcgcatgaccgacggctcgttccgcggccggtcgtcgcctgagattgacgtcatcgaggcgcaggtccacgacggcgtcggcgaggtctcgctctcctcccagtgggcgcccttcgacgcctactacgagtggaacaacgtctcgttctcgagggtcgaggaccccgagaaggcctacctcaacacgtacaagggcggacccttccagcagacgacctcgtacgttggcatcaccaaccaagagtgctaccagtaccccttgagcggggccgccgagggctgctttgctgtctatgcgttcgagtacaagatgggtccggacggctacatcaagtggtacaacgacggcgagctcgcctggacctaccgcgagggcggtcttggcccgaacccgcgctcgggcatcagcaaccggccgattccgtacgagccgatgtacatcatcttcaacctcgccatctcgctcaacttcggcgccatcgactttgagggcctcgagcctatgtggccgatgaagatggaggtcgaatatgtgcgtcctcgctgcgcgcgctgactctgcatcgcggccgagctgacccctgctcgcccttccatccccagctccgcgtctaccaggacccgaacgacatccggatcggctgtgaccccgaggacgcgccgacggcaaagtacattgaacgctacgctgaagcatacagcaaccccaacatgtgcggcccctcgcgtcctccttccactctcctttgcctgtctgatcaaagccttctcttgcttcgcctgcagcacgacgtgggaccagatgaccaacaacgcacccaagccgaagaacaggctcatcgacacttgctgagcaggttctccgtacactgtctccctctcctcgcctcgacctttccttccttccttctctctctttctccctacgactatcttgctcggagcgcacacacggatcccgtcttcccagtctcgcgcgcgttcctcctcgtatacaccttccatgatcccacctttccaccagctgctccaccacaccacggaccgtcgtcatcttccctctctcgctttctctgccctgcgcccgactgcaagtcttgcgcctctctccaccctgcattgctccttcctgccttttttacgccctctacaatgtctccataagctcgtctctcgcgcctcttacaagatcgggagtctgttgaagtcgagttgtgtgcagacaggtagggcaagggccgaccgcgagcaccccctttccagctccttccgctgcgcgagctctcgaccgccgaccatcacatccgcctctactccctctttcccgtccaatgcgggagaccgagacgctctattccatcctggagctgtcgtcggtcacttgctctgctggcgagagtacgtcctcatgctcgagccagctcctggcgactcggggttgctgaccagcagcggcccctgtttcgacccgacctgcctcagtccggaaggcgtacttgcgcctggccagagaggcaagctcaaccgctctcctggaccactatcgcaagagctgatctagacgcttcgcagcaccatccggacaaggcgaccggatcgtcggcggctcgacagggtgcggctgccgctttcagacgggtgaggctccttccgccccccatctcgcctcgtcgaacaggccatctgactcgaacctcgcttacctccttgcgatcagatccacgaggcgtatgcgatcctgtccgacgacgtcagccggcacgaggtgagcctcgtccttgtcgccggcggagacaaacgccgtcgacaggagtgacgccgaacacgggctaatgaccagctgaaccctcttgcggtagtacaacgacacgctcggcagagatggttcaagtcatagcatctttcagtctggctcagcatctcggccgggcaggtccggcggcagtcaacaatccaaagtcaacgctgacgaccgaacgttctcggaagcccctttttctgccgagcccgccgaccgaccatcgtcatctcgcctctggagagaccgctctccgtcgttggacagcagcagcacatccgagttcgagcatgacacctttgacggcacctatcggcgccgtgccgactcaagtttaggcagcgagtcggaagatgatgctggccaacggcactggagccatcccggacgagctgcgccggatgacgcgcccttcctggctcgtgcgatgcactcgaaacagtcgctacgcccgccgccttggccttttccttcacgccgtcagttggcgcccgttgcttcgcggtcgccgacgaggtcgcgtcccgggctagcaccgcgccgccgggcactgccgccgtcgccgccagaagaggctctcgactggctcgaacggcttgagcaggcagagctgctcgaggcgcaggccgatcggagacaacaggccggttcgtctgggtcggtcgcctcacggaaaccaggagaccgcggcatgaagggcaaccggtcgtccgccccgccactaatcaacatccctcggcggtcagtcttcgtttgccctatcctgcgagggtcgatcgcttgtactaacagtctcctcccctttctttatccaggctttcctcgaattctctctaccctcggtcaccaccagtgtacgatcctcggccgacgttgccgctccggtctcgctcggtcggctactcgcagggccctcctccgacagtcgagagggcagcgttccgcgtcgtgtcgccgcacgcggacggccgggggtcacttcgtcctgcccctcttccgctgagcgctttccagccttctcagtccagcggacgccagcggccttcagcggtcgctttctacggcggaaggagttccgggctgccagcttggatgggcgggcaggggaagttcggcgtgcgctgattgcacgagtcggctaggggttgcgggagggcacccttatccatttgccgcctcgtctggtcgtgccctctggtacaatgcacctgtcgcaacccgttcgatcctgctcgagtaagcatcgattcttagtgcatgctcgagcaagcgatgccgtcgtcatgcgagtgcgagtggctagccggtggcgaagcggctccttccgccgtctcgctgccgctgtcttccgcgtcgtcgcccttgacgacgccaatgtcccactcgccgccgacgtcccagcgcgagcaaggggcggaggccgacaggtacttggtgaaccgcatgacctgcggcaaagatttgtcagcggaccgatgttagcgcgtcatcctcagttggcaacgacatgcgtggacgcaccttcggatcgcgcaagacgacaagaagcgtgttgaacgatggctggatggttagcagcggcccgtcatcctcctcatcgtcctcgtcgtcgtcgctcccatcgccggccgcatcctcgccgtcggctcgccgaggcggcggctttgatgcctggtagaccgctgggtcttcgtcctcgtccggcggagcgagataggcctgcggggaagaaagacaaagtgagcacgcagcgtagacgtcgaccagtgaaagtgctgactgacctcccagcctccgaacgcctcgccgccatcaagatcctcccacttgtcgccgggtgtcaggccgagccggacgtcgagccgactctcgccgccctcttcgccccgagcgagcgtatagtcgagtccgggccgcaagcgacgggcctcgagtcggtgggcgagcggcgggaagccggtgagcagggccagccatgctcggaacgcgtccgacggcaggactttgctcagcaaggtttggacagtggccgtcgcgcccgctgtagcgcccgtggcctcggtagtcggcttgagcgagaggaagcgctggcgggtcgacgggccgacgacctcccagccctcgtcgccgtcgccagcgcgcatgtcagggatcaggcccgcccgcgaatccctttcgagcccgtgcttgacgtcgagctcgatcaggccgacctcaagcccaggcgcgaggtccggatgcaggaacttgtcgaggagaaggaagctgtcgttggcgaactggctgccaatcgcgccgaggacggccggttcaaggtattgcgggtggaggaagggcgcgaggaacgagacttggtccgcggagagagccgtgccgggagccggagggtctaaagggtaccggatcagtcgcgacgtctgcgacaattgggtctgcaggtggccgggaaaagcgaggtcagcgcaagcgtcgaggacaagtcacttatatcgctggcgacgtacaatctgcgcgagcgacgaagccaggccgtcctgctcgggtccctcatagccctcctcgccctcctgggccttatgaaaccagcccgagatcgagagcctctcctttggcgggccagcaacgacctcctggacggcatgatagctctcgcccggcatgacctcgaagaagacaaactgggcccacttgggagggatcgacttggtcgggtagacgtcggagccgacctcatcgcgccaggtctggggcgttggccgcggtgacgatgatgaggctgccgtcggaagcggggctggcagcgctgggtagagttcgagcgcaccaccgtcggcggccgtccagggcgtcgtcgggaggtacatgatccacgagatccgccgggtcgagatgacgtcgtcgtgcaggagcaggtggcagctatgcgaggccagcaaggagttgatgcggatcagcccttgcctcgggtgatgccggctgataaggtcgacgataccgctgaagaactacaacgcaccctttcgtgtatcgcgcggaggaggcatcgaccttggactggctgagcgggccgcagccggtcacctggcggacccaggcccgaaagtcgggcgaatacatgctctcgcggagctcgcgaagcgccggcagcttggcgagcgtctctgcggcaaggtgctcggtcgaaagcgaggcgaggtcgaacgactggttgagctggaggcggccgtaatagaaggcgggtcagcaagttgggcggcctgcgctttcagccgtcgaaggggcgggactgaccgagtagatgtcggtgctcttgtgagcgaagccgacgaggccgccatcattgacggcgagctcgtccctgacggcttccaggagctcgtctgggaagagccggtcgacaactgcgtgccggtagggcgtcgaggcagcgtactgctcgtgcagcgctgcaaccgtcgactgttcgaacaaggtcgggacgaaggctgccgagccagggggaccgccttcgatctttgccttcttgctgacgctcgcagcaatgctcgatgagggtgatcgtttgattgtcgacatcgaggcagagtggctcgaggaggtttaagggctgaggagtgacagtcgaggaacgacctcgtcctcctcgtcgacgtcggaggccaagggcgagccaggtacccacgctgtgccaggcgggccgggccgaaacgacccgtcccgcctttgtcgacctttgcctctcgacttcgaccctctgtttcccttcctcagcaagcctcctctcagcaaaaacagcgtcgatgtctgtgaccttcctgcactgcctcggcaaagcagccggcgcctagcccgcatcatctcctccccatccacgccctcaaagcgcgtcgcaggacgaccagcagcaccggtgtccaaacctgtgccggcgcctcgaacgaggctgcccggcacagaggactgagaccctgactgtcgaggtcggggaacggtcaattagcagatccaggatcatgcctgcggtgcaagctgctttcggtcgattcctccttcctcaccctcctgtgacgctgatcgccttcggccgccggccttcccggcctcgacttcgacgctactagatgaggtcagttactggcttgtgcgctcgtgctgcgccgcctcgtcgctgcttgagatgtcgagctgcagccctcgtcgttggtcgtttcgggcgcccactcgtcgacgagccggccggtcagctgacaatgctctcccgtcctgcgcgaccccttcacatctcttctttccagtcacctcaagacgatcgatccggccggtcctatcgcagcgactgctgctctcgatgagcaggtgcacgccgcttctgtcgcccgcgaacgccgcctaggtgcgtctcatttcctacctcacgcgaccaagagggctggcccggcgcggacaagtgccgccgtgccggagcgccaccggcttccgcgggctcaagtgctcagcctgctctagcccaggaggagtacggaagctgatctgtgctcatgcgttccgtccctctcccagtctggaagctcgacctcatccgtgcgtgccttacacttctgcgccgcgcagtcgtttagaagtcaagtctaacgcgcctggttctctcgtcgccagtcatgccgctcttgacgatcacgtacggcttgcagtactacgacagttagtcgacctcttgtgccgccgatccttacatcgactgcttgctgacgtcctgtccctctgatttctccttcttcagaggtgcggtttcctccgagctcctgatactgcaagcaagcagacctgccagcgccgttccctgacagtctacctacgtcgctttcaggccgtgctcaactcagcttccatcttcggcatcatcaaagacctcggcctctcgaccaagctgccctcgggcgcgacctcaacgctccgctactcgaccacccaagccgccttctacttcggctacatctttgccgtcctgccctttgcgctcgtccttcagcggctgccgctcgcccggacgctcggcattgccatctttgtctggggcgtcgtgacgatgctcaccgtcgtcgttaagaactacaagggcctcgtcgttcagcgcatttttctcggcatcgtcgaggtccgtcccggtcgcacgtagtcggtcctcactagccctctggctgacctcgcctcgcttcctggtcacagtcgagcgtctcgccgggctttgtgttcatcactgccctcttttatactcgtagggagcagacggctcgtctcggcatatggttctcggcgagcggaatcttctcagtgtaggtctagcccactctctcgattcgagccgctctcggtgcaagtcgctcttgctgacttcttgccgcttccgctcatctccagcttcagcggcgcagtcaactatggtctaggctcggccggcggctccctcgccccgtggaagctcatgtacctcttcgccggcgccatcaccatgctctggggcgtcgtcgtcttcttcctcctgcccgagtcgcctgcccggcccggccgtttcttctcggccgaggaccggctcatccttctcgaccgcgctcggcgcaaccagacgggcctcaaccggaagcggtttcagtggtggcaagtccgcgaggccagccgtgacccggccatctacatctacttcctgctcggctcgtccatctatgtcggtcgctcgtcgcttgccttgccttccccactcccggcgcgctgactttgctgtactgcgcatctcctcaccaggtcgtcaacggcggcgttaccgcctttggtgcccgaatcgtttcgtccttcggattcacgtcgctccagaccatcctgctgctcatgccgggcggggcagtgacgatggtcagcatctacttcttcacctgggttgccacgaagtggcgggactcgcggacctatcttttgccgatctcgtgcatccccgttgtcgtcggcgcactcatcatctggcaggccagctggtcgaaccgggcggccccactcatcgggttctttttgttgtgtaactttggaactccgtacgtcttcctgctctcgctgtccgctgccaacaccgcgggcgggacgaagaagagcatcgcggctggcgcgaccttcatcggctacaacgttggtaacatcagtcagtccagacacttttactctccccgtctctgctggcaacctgaccctcgtgtcccttgtgcgctctgcagtcggcccgtacctcgtcttcacgcccgagaaggctgtcaagtaccgctcgacttggatcgccgttatcatcgtcatggtcgtcgcctcggccctctcgctcgtcctccgcgtcctcctcgtccgcgagaaccaccggcgcgacgccctcgcgcttgctgcaggagtgccgacgggcatgctaaccgaaacgaagagtgccgagcacggcgacgaggaggcaacggcacacgaccagagcgtcttcgacgacgaccggacggacttcaccaacctgaccttccgctactcgctctgagtcgccgacgaggaggagtgcgacatctttcaacaaggtcgcaggcgaggccggtccggagggaggtacaggaatggggatcgtgtgatatctgggatgagcgtggcaaacgagcgcgacagatccagacagccagcttctcgaccgggccctcgccggccgacgactctccgttgtgcgcgacatcccagtccttctcgtaagctaggagcgcgtgccactcgtctcagcacgttgccaggacgctgacagcgagcatgaccgacagatctgccgccgagcacgagatgagccggatccacagcagcggcggctcgagccggccgacgagcaggaggagcttgtgccgcgagacgacggcggcgtttcaggcggccagcggaaagacgataaagaacgctagctgcgaggtcggcagcgcctggccgaggctgaacgtttcgcaggccatgctcgactactggagggtgagcgttggtaagtgacggttagcgtgatccttgtccgtcgtcgtcggtcggttgggacagccaaccgccgcctcggcaatccggccgacggccgagcgacgccgccggagccgagaccgcccgatttagacggcgcccgcccaccaacgccttccctccgagggcaccctccctgacgattcctgccagctcgcgatcctgacaacaacccataccctcgtcagagatggatccggacttctttcccgctccagacgccctcccgctctcatccagcacgccgtctggctcatgctcgccccgggcgcctggttcctcgcggcggcgctctcgcgcgcacggtacctcgccatctgcgggctcgcctggccgagggtccgcggtcaacgaggccgccgagagcgcagggagcgaatccgacagggcttgcccgttcctgcgcgtccatctcgcaaggaaagggcgctcggcctggacaagggcgacgacctcgtcgcagcagacggcgttacggaaggctcgacggcggacccgcgggtcaagctcgccctgggcgctctactctgcgccctgctcggcatcattgacattcgccttgtctgttctgtctcggacagctgggaccgtgccatcttctgcatttttgccagtctcctcctggtaagtccttcgtttgccgacgtgacactcgagccggactgaccctccctatcgctctccaggcctttggtctcggcgagctcgtcctctgggatatgctgggccctcggacggattatgcacggcaaattgacggctgtgagtcgctcagtttgagcgaggaagcgccggcaccagttgctgataccgacagccttgctccgcgcagccattgctaccacccatgctaacgaagcggtcgaccggacgtggccttggccatttcgcgtcgcctgttggctcgttgcatttgcggtctttccctcgctcggcaccgacccgaggcttctttgggtcctcgtgccctttgcgatggtcgcgcacagcaggccaaagccgcacgtcaagtggaccatcatgccctcgctcatcgtttccccggccgcgagtgcaagcttctggctctggctttgctgggtcaaccggcccctgccgcctggtcccaagagcgacctgctatcgtccggcgtagtctatacggagcggccgatcgacggctcggtcctcttctggcgctgtctgccagatgtgttcgtcgtcccggcgatgttcctctttgtccagtcggcctgcttgctctaccggttcgacagccagccttcgctcgaggacgcagacgcagagcgacagagtctcatcggctccacatcccctcagctaggtatcgagctgcccatcgtcaccgtcccgtcggcgcagatcgtcattcgcgaacgagtacgcattctccgggcggctggcttcagccgaggtggctacttcggactcgcagtcatgctcggcattggctggcaggtgctcgagccagctgctcgttatatcctctacgtccgtcgccagctgcctgcatcgagtaaaatcatcctcccgctgaccgtctcctacgcacgccccgcgcagtcggacctcatcccgctctctgccttgctgcccgagtcgcgcatgatggccggcttcggcgcggctggcaccatcgctccggccgtctacctcaaggcgcggctggcaaaggatctcgaccggctgaatgcgtacgaggaggactgaggggagaagtgattgacgacgccacttgtctttcgcggcccgacttggaaggaaaggggtgtgcggaggtcgtttgacgctgagcgcttgcgcgcgtcgatgcgcttgggattgatcgacgctgagtcttccctgaaaaagcgacagagagcgggtcgagagagggctgcgctggctacagtcctcgcctctccacctcgtgcacaacgcagcgtaacacgttgtccactagccgcgatgcgagccgttcttcagccaaccctctctcccccctctcagctcgacggacaaactccgcctggcctgccgtccagagcggccacccagctggccgcgacccctcgagctctcgacaaggccagcgcacgagccagccgccccctcccgcgagcaggaatccggaagcgaggggggcaaagtcggcgtcgcatcatccatccatctcggcccgattactcggacgaggccttgaccttcttggtagcaacggttccctcccggaagccgtctgaggagtcgcggaaggcactggtcagcggtgagccaggcgataagcacgacgccaaggggacgccaaagggacgcactcttgaagcggcgcgagacgtccttgaggtaacgcatgcggccggttccggtcgtcttgcgacgctgggccttctctccccagttgtacgaccgcatcttggcggcggggtagccgcactgagcgcacgtcctgagacgagagcaagaaggaaagatccgcggtggtcagggacaggtcggatgacgtcctcccgggcaaggacacgagagcgagcaggtgggcggcgcacttcttctgccggtggaacgaccggctgttgcaccgacggcagatggtgtgggtcttggtgtgacgcttaccgctgcagaggtcaacagcggcaggtcacaagcgagagcgagcaggagcaagcagtggagaggtggcatgggcacggtcagcgactgatccggagagcagagcgacgacgagacgcgagcgggaaaggcgcacaaagaagaggtaccctagaggtgaccagaacagcagcgacgagaagacgcgaggcaggaggggtcagcgagaggcctcgagcggcttgtccaggtcggcccagctcgtctgcacactgcgacgcagcgccagctgatgcgcgcaggctgcgacgacgcagacggactccgaccagatgggcagagaacggaccttggtcatcttgaagctgaggtaggagaaaggtggtgggcggcgggcgagagagtgcagggtcagcgctctgagccaaaaggcaagagatcgccgagcagccggcagcaagcgggagcgcgcatgtccctagtcggttgagcgagctcccgtccctgctcgagcgtgcagccctcggccgctctagacctggctggtcctgagcaacagtccctccccatcgctcctgctcccgcgctgctggcctaggcgagcgacctgcccctgggcaaagacgggaagagctcgactgcggctgagctccccgtcacgccgtaggtcatgcatggctccgcctgcgcgcaggaagctccctccggagggccgccctcaggcgtgcgacagagatggctggaccgtacgagcgctgtgccgaccgatgatgctgctgtggtgctgctgctgctgccctagggtgggacgactcacgatttctggcgtaggcgagggacaggagaggcagctccgggcggcttggtgagctcgggcgtgcgcgcgggggcgcgggagagtgagcccaaaagatgggctaccaaaacacaggcgtcgggtttaggaaatgctcgggcggaggatgcccgtgccgcgctgttgttgagggccggcccgcgcgcagatgccaaggccaaaggtggccaggccgctgaagtagccttaccgggttcgtgcttgctgcctcagcatcaagcctggacggcgaaataaactgcggccgtcctgtggtgcgtgaggtggtggtctcggactcgatgccaatccatagccgacacccgtcgctcaaaaatcgagcagaaaatttagacggcatttttgatgttgatcatccacaacgaagacagaaggggaagcgaggacatgcacagggacagagagagggaattatgagcgctccaggcgaggtccttagacggtgagctggacgccctttgcgctcttgacgacggcatcgtacggctggagggccggcgcgacccacttggtcaggaaggcgtcgacctgctctggggcacggccgacgaagcccttggggtcgaggctgatatgacaatatttgagtcagcagggttcgacgacgggtgacccagcgtgcgccggactcacagctcgtcgagctggggcagaatgccagcaaagtactcgtccttgcggacgcgctcaatcaggtcgttctcgccgccctcctccttgacgacacgaccagcttggtgcgagaggacgcgaattttctcgtggcactcctgccggtcgccgccggccttgacgatcgccatgatgatgttctcggtcgccctgcgcggtcgagcatgtgcggtcagcgtctgttgattgggcagtcagacgacttgaggacgaacatgaacggcagctcctgcgagatgcggcgggcgataaccttggggtagacgacgaggccctccatgacgttctggagcgtcgtgaggacaatgtccgccgtcaggaaagcctcggggatcgtcacccggcggttggcactaagatgaaatgggtcgggtcagttgagactggcgtgctgtcagaatagagggcagagtcgcgacgcacgagtcgtcgagcgtacgctcaaaccactggaccgagttggtcatgaaggcgttctggggcaggatcatgaggtgccgggcgagcgagcagacacgctcgcaccgcatggggttctgttcgacaaagaaataagtatgtcagctttcgcctctgctctatgagggaagcgaactgcagacgtacgcgcttgtaggccatggcagacctgagcagagggggtcaagggaggcgtcagtttctcctccgatcgaagccggggcgcctaacgcacgagccgatttggtccttctcgaagggctcctcaatctccttgaggttggcgagcaggcgaactgggcgagtgatgggaggacgtccgagtcaggaactacgcctcgacgcgcgcagatcatccagcgaggacgcactgtcggtcgcaatcttgtgcgcggtcgagccgagcgatgcgagcgggccaaggacgtcgcagtcgatcttacgcgagtacgtctggccggtgaccgggtaggcgtacgggaagccgaggagctcggtcacacgggcgtcgagagcctcgaccttgtcatggtcgccgtcaaagagggcgaggaacgaggcctgggtgccggtcgtacccttgacaccgcggaagccgaggtcgtcgcgcgcacgcgtgaggttgcgcaggtcccacagaagctcctggagccagagcgtcgcccgcttgccgacggtcgtcagctgggccggctggaagtgggtgaatccaagcgtcggcaggtccttgtactgctcggcaaaggttgccaggcgcgagatgacggtcgcgagcttgtcgagcaggagcgagaggccgtcgcggaggaagatgaggtcggcgttgctgcgaggccaggtggaagtcgcatcagtggcctgcaagcggcagtgcttgtctgagcacggctaggacgtactcggtaacaaagcacgaggtggcaccaaggctggcggcgatatcgattagggagagcttgcagtcagcagccttgctagggtctcgagtgactctctccctcgaggccaggagacgcactggatgataccggcggcggcaggggcaacgagaccgtaggtgtggacgtgagccctaatagaaggcggactcggtgtcagctcggcctgagaactatcttggcgcgcagtgctccagccagatggcgagcatcgggcgaccagcagctagacgcacataacgtcgtgccgacgcttcttctcctcctcagcagcgagcttgaactgctcagcgtcaagggtctgcagagacgggagatcaggggccgtcgttagtggttgcagaagcaggctgcgcatccgtgtcccaaacagcggacgcacgaggttggccgacatctgctcgatggcggcgtccgagatgggcaggccgagctccttctcggcgatggcgaggttgagccacagctgagcatagccaagtatgtcagtctggcagctgatgattggagggccgacgctgccgacggaagctggtctgtaagcagacagccgccgggagggagacggaccttgcgccaggtgccgaagcgggtctgaagcaagcagtcatcaagtcagcattctgctcagcagtaccagccgataccgatgtacgctcaccgagttcgagaagaggttcgacatctcggcgctggcatagcgcctgtcgttcggagggccgtccgaaagccgctcgaggtcagcgagccgccagaggtcgtcgcctcagcaggagcgaacgatcggacacgcacgacgagagcggggtctggtaggaatccatcttgggcgggtgagcagctgactgggtcggggcaacaaggtgtggtcgagcggagggagcaacgacggaggaagcgagcgtttcggctcgggcgcgggcgaaaaaggcgcggaggtcgcgcagcagcaagtgcgacagggccgaagacgagcgacggtgatgacagggctgatggaagggcaggtcaacgagacacggcaacggccgggataggtatcggctgtctggtgcgagaaagctgacttgaagaggccggatgacagcgagctggcgtgacctgtctatcgactaggcagcgaggtcggtcggcgcgtctcgctaaggtgtctccctccttaggatctgccctcgttctgccctcgttgctccagtctagctcgggagctgccagtgagctcgcaggctcaattactcgtcagtcgaagagcagctgtcgagaagaaaatgagttgtagcaagaagcgtcctgacagtcggaggacaggcacgcgccggcctccgccgcggccgaggcgggacgctgcgctgcggcttccttaacgacgacgagcatctctgactgttggccttctcccggcagccactcaaaatccgctgtcatcacaggtcggttatcagccttttcagctgcagcggacatgtccagactggggccgggtctgtaggctgatgcctttcagaaccatctggcgcgccaggcctaccagctcgtcgccgccttccgtcgttcgccttccccctcctctccccggccgccgtccgagctctgagcttgtgagtcgcttagctctgttgctagacctcatcaaatgaaccacctcgtcggcgagactgctctgtggcgtctgctagtcatacagccgagactgcaagccgtggccgagaaacgtagcactgacccaccccttcatgctcgcttaacgccggctcatcattcagagctcgtctgctaccaaggatgccactcatcgttgaccgctcgccctactggacacccgactcgtcagagtccatcgaagccttcctcggcaaggtgagctgccaccacctgcacttagcgtcctcgcctggggcgactgcgcgcgctgacctctcgcacactcacgaccacgacggcagaatcgtccgagccaggtcgtcgatgacggtcggacgtccgtgagttgctctctgagatttgaagtaggtcggttgttgatagtcctagattttctctgccagtggatctgggtcgctaagtcggcatccaaggtcgagcgcgacgagcgcaccgcaggaagggagaagacggccatcgagcttggaatggaagcttgtgagtacctgcgtggatctggcacggcttccatcgctgacgcgatgctgtatgcttcacagtccgcgagagcgaggctcacgccgacaagatccagagcgacgcttccatccccacccgggccagcaggggtcacaagtcgaaaaaggcctgccgcgaggaggtcgatccgcacccccggctctacctatcgcttgagctgacccgacattgcccttggtccaggctgccgccaagctcaaggacaccctgcacgagcttgccctcaagttcggctatacgggcggtaaggtccttgtcttccgcaaccccaactccatcgacaagtgcgttgccgaggccgtactcctgcctgtctcccgaaactcattttctcctgaaacgtgacaggacgttcgccctgcttgctacgtctctcgtcaagggcccgctcaaggacaccgagctgagcctcataaagtgctcgacggtcgacccgacctcgcatagcatcgtcggccacggcgactttggcggcggccgcgaggcccagcatgtcatctgcttgtactttgacgacgtcttcgcgaaggacaagtccgccaagatcatgcgcacgctcgtgacggcgcacggcttcggcaagggactgacggtcaaggctgatctctacacctgcatcggccttgactcgaaggtgcgaaccgctgcgcgtcccagcgtcgaagaccgctccttactgacccctgcggacaacgtagaacaagctcggcatgcgctcctcgatctggaccgctgacgagctggtcgggaagaaggagctggccgtgaagtcgcgttcagtcccaagccactttgtctggcgtactcaccgcgttgtgcctttcggcaggacctaatcgaggagcacacgcagaaggcgcgcgcgcggccgcgcccgggcagagcaagaagcgcaaggcccgcaagagcgaattcgacgacaacggcagcgagacgtgcgtcctgctccgagcgttgctcaggcgtgacaatcggccttcctaacatcctcgctcatcatcagtgaaagcgacgacgagcgcgctgcccctcgggcaaagcaggcctgaggccgactggcacctttgacgacgacctggctcttgtttgacccacatgcctcttccccaacgacccggacgacgatccatgcccttctcctctcgcctcatcatgctcgagcaaatgcaagcggcttaaccaatgtttcggaccgccctggccaggggtactgcgcacaagtcgcgtgttatacagaccgaggatggtcgctctcgtatacagtctaggtgagagatgatgagggggatgggtgatgcgtgcggtgtgtgcgtgcgagatccaaaatgcgagagtatgaggaaagagcccggccaaggaagcggaagacgagacgaccaagagccccatgcctaactggctcactggccgtcgtcggccaagagcccttgccgctcgtcgctaacgacggcccgggcctcgaccttgtcaatctcgtccctccagtcgacgacgaagaagtagattgagagttcgatgaccgagacggtcgcgagggcggtcgcctgggccgtccagaggccgacgagaccccacgagtgctggaacgagaggctgagcggcgcggaacatgcaggtaggaagggagtcagcgcgctggtcttgtgccgaattcttgccgaaaggacgcacaagtaagccagaggtatgccaatgccccagtaggcgatggcgtgaacgatggcagcgaccgtctgccggccggtcgcgcgcaggatgcccgcagcgacactctgaagcccgtcaaacacctggtagcacgaaacggcaatcgcgacgcggccgatgagctcgaccgtctcgcggtgcgaggtgaaggcgtagccgagctggtgccggccgaggaggatcgtgagggcaagacacgagcaggcgccgacctcgatgatgaacgaggccatgacaagggacttgagccgccggtacgagccttggccgaggcccatctgcgggtaaggagggtacgggtcagcctgagctgctgacaggagtctgaagccagcacagcgacgcacgaggttgccgaaacgcgcagtagcaacgactgcgaaaagcagagcaggcagcgggcgtcagtcgcgcagccggagtgacgtatagttcgacgtgcgaagagactcacctgagatggcataaggcagcatgaagagaaagccgtcgagcgaggcgaggcctgcctgggcagcaacggccgtctcaccgagccggcccgcgagcagcgcgacgacctcgaacgagagccactcgagcgagtacgagcagatgccggggagccagagcgcgcaaaacgtcgccttgccctcggtcagggcccgtatcgagaagccgccccagcagtcgcgggccttgctccgccagacccaagcggcgatcgatagcccaaagaggtagtaggtggtgatctgggcgagggccgcgccgtagacgccgagcggcgtgtagagcgtcaggaccgcacatagcgcgccgtggatcgggagcaagacgaggataatccatgtcgagggcgtcatcatcgcctgcgactggaggaacgtcttgccggcctccatgcctatgtagccgggctgagtgcggcgagagtgacgaggagcgcagtcagtgactgcgcacctagcgcgaggacgagaggacgagaggacgcaccatggcaaaggtcatcagtcgcatgaagtctcggaggcctcgagctagactcggcggctgtccgagagcgagcatctgcgagacgtgcggaagacgggggagcagagtgcgaatgagcgcacgtccgctcgaccgagaggagcgagctggacgagacgcacgacagcctcgatattccaccagagcacgtagatcgggagcatgccgatgttggagaggatgacggtccgctgaaggactataccgacgtccgtcacgggctggttcggtgcggtgaagattggcgcagagagcgtcacctgggccgaggttgcggcgagggcgacgaccgagcccgtgacggccgaaatcatgaggccctggccgacgatggcaagctcgacctgaccgagccgaccggcgatggcgaccgtctgggagggaggcgaaagcaagttggcgtcagctcgaaggcaagcgagagtgctcgggctgtgaggagcgcggggccaaaggagcagagcgagctcggagggacgaaaggaggacgcacgatcaagctgacgaggctctcgaggcagaagccgaggacgaggggtggtgactggcggaggaggtagccgatctcctgcctgatgagggcgtgcgacgagcgctcgacgacggtgccgtcgaccttgaggtcgtcctcgtcggcctgttgggaggacgagagcgaggtggaggaggacgaggcgagcagcggctggcgctcgtccgcggcgtgggcggcggccatgtcttttgcgtgctctctgttctagtaggctgcttctagagaagcggtctgggtctgagctgcttggtgtaggtagagtgggtgctgtgaaggaggtaagggcgttgtcgttgagggctgaacgtgccgcttcctgcggggaagacctgcgcgggccggcacccgctgcgcctttctccgccggcgcgcgcgggagcagccgaaggccgccgtcgctcctccagccgccacgaccatcctctactacctttcttcagctcgccgcctcttcctctcggccttctaccgttccatctgaccgcctctacgacccctctcgatacacttatcacgaagcgacgatgtccggcgcccggttcagtggcctctcgctcgcctacctacacggtccgtcccgccgcggttcagtcacgtcccgagcctcccgttccaggcccgcagctgatcccacgcttcgctcgcttgtagccgtcaaggtccagcttgcgccgacatcagtcaagctgcgccgggtgctgccctacttcacgcccaagtcggccggcgagctcatctacaccgccacgccgccgccgctaaagaaggctggcacgggcggctcaccaacgcttcacctccactttgcgctcgccagccggaaggccgacggcggcgagggctacgacgagtcgctctcggttgtctacacggacgggagcgagctccaggttgagctggacacgcttccgacggccaatgacatcctgctgaggatcgagcgcaaggcaaaggagctcaagaacaaggacgaagcgctggcgctgtgatgagacgaccccttcttgacgagccgggcgacaaggcgacggttaggtggctgggcgaggacgtcgcgcgcacgcgtgtttaagttaaagctcgacgatagttgaccgcctgaccatcgtcacgggcaactgacgcgcttagcaggcgggccgaccgagactgctgacaccagtgggcgtactcttggaggtaggtcgctcatgagatggggggagcagtcgtaaggaggggccttaagggcagcgcacaggagggaagcatcgtcgagcgccagagcgaggagagagaaagagaaggctggaggactcaagaggttgcagccggctagggctagcctagcgacgcggccgcgggtcatcgtcgtctgcgtccgacgccggcgcctcgtcctcggcgtcgagcaagagcgcaacagagtcggccacctctgcctcgtcgtcgtcgtcgtcctcggcaccctcctcaacgctggcagcctcgccctccgacccagagtcgtcgtcgtcctcctcatcctcctccgagtcagtgtcaaagtcgagctgaatgaagtcgtcctggttggcgatgagcgcgccgctgtcaacctttggcccatggcgccgggcagcccggcccgcgccatcgtcctcagcgccggccggccggtcgccggtcgagtcaaagaagaaggccgggccgtctgcggagggcgacgccggccgattcgcctgcgacttgaggacgtgccggagcccgcacttgccgtccatccggcaggtcccgcgctcggcaaactccttgcactcccacgcgtggcgctcgtcgcagtcagcgcccttgtcgcaccagccgtagcggccaaagtcggcgcagagtggggcgtcgtcggccgtctggacgtgcgggtagaggcaggcctcgcccgcccggcagacgcccgacgacgcaaagtgtgagcaggacggcgtgttgtgcgccgagggctcgtgcgatagcggacaggacgaggcgctgttggcgcacgagccacggaggaaagactggcagatcgagagcttggccggatcgtgcacgtacgggcacgaaagggccttgttgcagcggcctgagcagaaaggaggacatacgtgagaatccgggttgcgcgtgcgggacggaggccgatagcgagaggtcgagttgagacaagagggaggagaagccggtggaacggcagtgatgagagagctgtgcgagcggacgtgcgggcaagaaggaggcgacgcagggcgacagtgctagctgtgaaacgcacccgtcttagtaaagtagcggcaagggagggcgaccgacttgcggaccttcttcttgcccgtcttgcgcccggcagcatcgccggccttcctctttgagctcctacgagttgagaaggagagcctgctatcagcctcttgctataaggaccgccgccgcgagcgcgcgtcgcttgggagcgcacctggccgcctgaacaccgttgaggacgagcgacatgttgccgagccgcgttttcttgccctcgagttcctccttggtaagctgcttggcgccgacgagatggccgcccgacggtccggcgagccttgccgacgaccgcttggcaaacgtcgacggattcatgagcgacatatgccggtcgctcgtcttgatccattgggtcgtcccggccgaggtcgaggtcgaagcgatgggctgtgccgagataacgaccgccggcagcgtctggacagggagcgtcgggctcgcagtggccgaagttgaggcagagggcgcttcggcagcggccggacgggtcggtgcaacagaagcaccagcaggagccggcgctgcgagcaccggcgcgttgaggacgagcttcttgttgcgactcggcgcgatggctgccggctgccggctcgagctcgggtagaagccgccccgtcctcgaccccggccacctcggctaccgctggcggacgacgagcgggtggcgggcggcggcgcggccgtcttggctttgtggcggtgaatggcctctgtcagcgggcaggagggaaggagagcagcaccggtcagctcgtctgccgtttctgaaagggacaacgggaaggggactcgctgtcgagctgggaaatctctgcaagcaaggctgcgtcggtcgacatgacgaggcgtcgtgtggcgggtcgaagtgctgaaggcgagttgtggtcgggagggagtaggcgtgaacacccgcctactgaacgaagtgaagcaggcgtgcgctaaaccggcctcgcgccgcgcgattgtcgtagactaaatgcctcctccgccttcagcgcccgataaagtggccatcaagctacatgaggcagcgtgagatacaccataaaagagtcataggctctgagcttcagccctgtcattttttttgagttctcaagttgcgttgatgatccgtcatgagcttcccaatcgtcaggtccagacgccctccggctgagggcgcagcgcgaatgcctagaaggccttgcttttgtccctcaccatatgcgcgttcctccgccttaattgaggcgttcaaaattctgtcgtagagaaaagattctcaactctctgacggtgcccttcactcgctctcatgatgctcggtgaccaacttactggacgccaaagtaagaagaggcctttggtccatgacattcacgccgcgttgggcgactttgacgcacgccccttccgcatacgcggaagggcggtgttacgcttataagggagagcgcacgacctcaagcagctcgccctcttggaagcctgcctcctgacagccatcctgcccgctcactccttcctgccccttgccggcgtctttacagcctcccttcgagaccagctaaggcgcgctcctaaagcaggcatgacggtcaggctctcggccgctacaccaggctctcgcccgagcccttagaccgggcggcccagctaaccgacgacagcggatggttgtcctaccgcccgacgttctcctgcacgtcgtcatcttcgcctcgccgccgacgctcgcagctctctgcctcgtcgatcggctcctgggcgcgtctgccaccaagcggctatatgcgacggtcgccctcggcggtcggccggaagtctacacgcgcttcttcgtcgcccacgccggccgagcaggagaggacagcccctgccgctacacggacgacctccatctcaacagcctcggctcgtcgccgggctctccagatctgccgcacatctcgaccgccctcttccccaacctcgagcgggtcgagctcgacagcacgccgcgaaccctgacggcctgccttccgatcctgatcaccctcaaccctcgccatctcgtcgttcggtcgccggcggccaacgagctcacctactcgttcctacctcatgtcgcgctacaagattgcacaagacttgagcggctcgacctctggcaggttgatcttcatccgccacaggtgattctctcgcacggcaagcgcccttgactcgaaaggcgactgacggtcgctcggctgcaggtgtcggactatccgcccaactatcgcttccctctccctcttctcccggccgtcacgctcgtttgctgggagttcccggccgtctcgaagctcggcgagggcttcctcgcgacgttttggtgggatctgaccggcgcgttcgacgaatgggcgcccagcgtccgaggcctgccgctcgagctccggctcgacctcggccggtcggaatgggtcgacgaggcacgagcggggctcgagaaccgggcgcgggcgtacggcatgcggcacgttgagtggcaccgtcacgagccgatcgagtggcgggcccagctgcagggcgtcgacatctgccttcgggcgttgccgagtggcacctagatagaatgacctgtaccctggccttatctgctttctcatgcgagtctatgggtggcctcctgtcgaaagccgtccctaggaggctgcgcggtcgttttgcccgctacctgcgcccggaagcgagactctcaacttggcttcagaccctcaccaccgacgaccccgaaacctcgacccgcccccctccctgcctcctcttctcacaggacgctcgacttcttggtcacgcctcgtctccgacacccgctcgcactatgcgtctcttgtcggcccgggcggcggccctgctcgtgctcggcgccctcgcacggccgatggccgccgccggccagcagcccgagtcggccatctcgaggttcccccacctgccgtccaggagtgcgtcaccggcacagacctgatcagaacctggaacaggatagcagctgatgggcgtcctcttgacaatcttggccgccagtcttctactttgacgacacagaggtacgctgccttactcgtcggccggcgccgtgcgcgctcgtcgcgtgcgcgaccctgcccggaagcgagatgggctgacgtgatcgcctcatgcttctgcctgttggatcctgctcattgctcgcgctcagtcggtactctaccacgatccgctgctcgagaatgtctaccggtcagacaacgagggcaagagctggcagctgattgacggcgtgcccgacggtgacgcgagccagctgatcgagcacccgcgcgacaacagcgtcgtgcgtcgcccgctcctgagctgcttctggaaaagcttgaggccggcagcaaagctgacaatcttacttgctcgcttgctcaggccttcattctcacccgggccgagtcgcactgggtgacgtacaaccggggcaagagctggcagcagttcaaggtcccgaagacgacgccgtcgttcacggcgtcgccactgtcgttccatgccaccgagacaggtgcgtgccctcgtttggaactgtgagccggcagcgcttgctgaactttctccccgacatcccgacccaaggctggatcctcttccagggcaccgtctgtgaagacacgaagagcggcggctggggcggccagaagtgctgggacgaggtcagtctgcctgtggtgtccccgatgccatccgctgggagccagtgctgatatgccagcggtcccttgctattgaccctgcttctgtagacgttctatacgaaggacacgttccgcagcgcgccgatcagcctgctcgcagagaccaaccagtgctcgtttgcgcaccagtccaaggactttatctcggaccagccggccgagaccaactcgctcatcttctgcatcgccttctcgcccttttcggatgacaagggaggcaagggcgccccccattcgatcgccgactcgcgcctctttgcgagcgacaactggtttgcgaatcaggagctcgtcgactttggcgtcgggaaggactctgccggcgttgttggcctcggtgtcgtcggcaagtttgtcgtcgccgccgtcaaggccgactcgggcagcggcgggagcggaggcgggccgggaagcggcggcgaccccatgaacatgttcgtctcctcggacggcaagacgtgggccaaggccaaattcccgcactcgtccacgccggcgctcaaagagaatgcctacgtgcgtcgcaccagtatgtgccccgctcacactcgcagactgaccgatctgtcgccgccttccaacgcagacgatcgtcgaatcgaccaagcactctttggcgatcgacgtcctcgtccatccgacggcggccgtcggcgacctctttgtctccaactctaacggcaccgagttcaccatctcgctccaggacacgaaccgcaaccggcgcggcatcgtcgactatgagaacctcgtcggccttgacggcatcggcatcgccaacatcgtcagcaatcgcgaggaggttgtcggctggggcaaggagaaggagatcaagtccaagattacctacaacgacggccggacgtggcgcgacctgcagccgccggccaagaaggccaacggcgacgactgggcgtgtgacctgcgggatcctgtgcgtccctctcctctctgctttcctgacccgctcgagggacgctgacgagactcaattcggtcgcgctgcaggcaaagtgctcgctccacctgcactcggtctcgaccccgcacaactatggccgcgtcttctcctcggccgcgcccggcttcgtcatgggcgtcggctctgtcggtgctttgtgagttctttgcgtgcggaaggttcttcagaaacaggccgcgatctgacctgcatgctcaccgcaatcgcagtttgatgccgtacgacgactgcgacaccttcatttcgcacgacgccggcgtctcgtggcacatggcctttgccgacgcagccaaatacgagtttggcgaccaggggagcatcatcgtcgccgtcaacgacgaggagccgaccgacacgatcaagtactcgtgggacgccggccggacgtggaccgagtacaagctcggcgtcacgctcagggcgctcctcctgacgaccgtacccgactcgacgtcgcaaaagttcctgctgctcggctccatgtcgcgcaaggacgctggcaccgatggccggcacgcgaccgtctttctcgactttgcgcccgtccgcaagcgccaatgcgacgacaacgacatggagaagtggtacgcccggccggccggcgaagagtgcctgatgggccacaagcagtggtaccggcgcaagaagattggcgccgactgctacgtcggccacaagtttgaggacccggtcggccaggaggacaactgcccgtgcggcgacatcgactttgagtggtgcgtcgtctcgatctccttcctgcctcaagacttggctcgctcacaactcggcgccccctccccctctcagcgacttcaactttgtcctccaggacggcgagtgcgttctcgccggtcccgagccggttcccgtcgggacgtgctcgcgtccgaccgacacctttgagggctcgtctggctaccgcctgatcccgggcaacacgtgcgaccggggcaggggcatccagaaggacgcgcgcaagcagaagagctgccaacaggcgcggccggtcgacggctcggtctcgcaccagacgcagtacttcaacagccgggtcgtccagcacttttactttggcgactcgcagacggtcgtcgtccagctagccgacaacaccatctggcagagctcaaatcagggttttgcttggaagcagctctacgagaaggagcgtttcctcgcaatggcgctccatgcgcacgcctccgaccgggcctacctcatcaccgactcgcgccgcatcttctacacgaccgacactggcaaaaactggtacaccttttcggcgccctcggacccgaacgggctcaacattccgatcttcgactttcacccgcgcaagagcgactggctcatctggaccggccaggtcgactgcggcagcatgagctcgacctcatgccgcgccatctcgcactacagtctgtgccttgtcgcctcggagggcttcgaccctttgcatcctctgctgacgtcccgctcctctctcgccaggcaccgacaacggccgcaactggcgcgagatcgagtcgtacgtcaagtcgtgcacgtgggccaaggtccagcatagcgcagtcgacgagcgcatgatcctctgcgagtcctttgccaaaaagagcggttcgcagcgggccgcgggcatggcaaccaagtccctcactgtcggcgaaaactattactcgcgcaagacagaggccttccagtcgatcgtcggctacacgacgttctccgagtacctgatcgtcgccgaggtgcgtcaccagagcaaacgtctggcaccactctcttcgctgatcgccttgactgtcgcccgccagcttgaggagagtaaggggacgctcaagctccaggtctcgctcgacggcgtccactttgccgagggccagttcccacccggtctcggcatcgagaacaaggccgtgcgtcctccgagcccatcacagagcgcgacggctttggctgatttgtactctgcctcctgccgcagtacaccgtgctcgagagcagcaccgactcggtcttcctccacgtgacgacgagctcgaaggagggcgatgagttcggttctatcttcaaagtacgcctgcgctcactgtcgtcccgtctgtatgccccaactgacgtctccttctttgcccgccagtccaactcgaacggcacagtacgtcttcaggccctcgcccagagcatacgccggcagcgggctgacctttaaatgccccctcgcagtattacggcgtctcggtcgatcacgttaaccggaacggccgcggctacgtcgactttgaaaagatgaaggggctcgatggcattgccgtcgtaaacgtcgtcgccaacccagatgaggctgcgatcaatggccgcaagaagctccagacgcgcatcacgcacaacgacggcggctcctggtggccgatggcgccgccggccaaggactcgctcgggcagtcgtacagctgctcgagcacggcctgttcgctgcagattcacggctacactgctcggcgcgaccccaaggctacctacagctcgccctcagcggcaggcctgatgatggccgtcggcaacgtcggcgaagagctcgccggctacacgtatgtccggctcacgatcgactcgtgtagcagggcacaagagctgacacagcagacgtctcccttacagtgacagcgacacttttttgacgcgcgacgccggccttacgtgggaggaggtccacaaggacgcccacctgtgggagtttggcgactacgggagcatcatcgtcctcgtcaagtacgtctacgagagacgccgaacactgagaggcatcgctgactgatcttctctcgcagcgacgaggtcccgacgagcaaaatcctgtacacgaccaacgagggtcttagctggagcacatacgactttggcgagacgctcaacgttggctcaatccagacggtcccgtccgacacgagtcgcaagttcctcgtgttcggctctcgtccgcgtaagaacgaggagacggtcgccgtctatgtcgatttctctgccttgacgacacgcaagtgcgagcagaagatggacgacccgaaccacgacgactttgagctctggtcgccggccgaggttcgggacgagacgtgcctcttcggccgtcaagtatgtcccttctgcagcggatccgcaagttgccctcgcctatcgactgacaatgcttccgtttgcctgccctttcagaccatgttccaccggcgcatccgggaccgcgactgctacgtcggcgaggcgcccaatctgctcgaccggtacaaggtcgtcaagaactgctcgtgcacgccgtccgactttgaatggttcggccgcagttgtcacgcatctgcgtttttgattggcagcctaggctgacgaccctctcctgctttttggttaatcttccagcgagttcaactatcagcgcaacgagaagggagactgcgtcctcttcccgggcgcgacgccgctctctgccgcctcagccgaggaggagcagtgcccgacctcgcccgacggcttctggtacgagcggaccaacattcgcaagatccccttctcgtcgtgcgaaggtggcgaccgacctgaccgcggcaagcgccacgagtgcccaaacgtctacgtcggtggggccaagagctggctcttctggggcacggcgatcgcgtcgcccttcctcgtggctgccgcgatgggtgcctggtgggtcaagcgtcgcatggggtacgtcgtccgaccgtcgcgcatgtatctgcaaagcgctgacctgtctatctcgcttcgctcagacccatcaacctcggcggcgaggatggcggagcgttcggtggcccgacatcgctcggcgcgctcgacatcctcgcgtcgataccctactttgtcatcggcgcgaccggcgcggctcttgcctgggccgaggaccagttcagccgcctcggcttcgtcgagcgtatgcgcacgcggcgcggctaccgctcagtctcggtcgacgacgatggtaagccctctcagtcctctagctatcagctcacggcgaccgctgacaccttctctcccctccctctctgcagctgctgtgttgcgcggcgagtacgacgaggagtaggacggccgggcgtttctctctgtccaaggcatcggctcaagggctctgtaagggtcggtcaacatcatacatgcgctttctctcctgacggcctcggggaaagaccttccggagatgaacaacaagcgaaggaacacgaaactgagggcaaggacgagagaggcatagagggaagtcgaggcagaatcgtagtctagacgaaagagagtgaagctgtcaatatgctgaatttgttggagattggtgccgaacggcgcagcttcagtctgcgagcgaagtttggaaggctcggcgtcagagaagacaggttggttcatctcaagtattcggagactgactcctgcgaacgacctgacgcgcgccagccttttagagcgatcactggcggcgcttgatcgtcctgacggacagcaagccgcaagaggaatcagcgaaccagcctggtcaagccgacgacagatcagagtgatgggccagactgctggaagaagaggatcggtcgctcgcagcccgagacccaaagcccatcgccgccctgctctacctttgtgagtgagcgagtgagcgagcaagagtcgagcgagcaaggacggcagcgagtaaggacggcagcgagtaaggtgtccgaaggctatcagtgtgaaaggcagcgattgtgtgccggtcagtctgcttgggcagcgaggctggaaccttgtcgacgaccggccgggtaaacgctgttggctggacgagcatcctgactggcgcccctcgtcctgaccgctggtgagtgatgggacagcggttagtcgcataacaggtagacggatcagtgaagatgggatgagtgaagcagcgcccgagggcaaattccggcgtcgagtttggtcgcgaggcgacttggccgcctcgggtgccaacttgagacaagtacacaatcgatcgagcaaaggctctgtaggggcaaacgagtgtcattgcgaggcaaactgggcagagcgagtaaagagagggaggagagaggcgagcgtccgagcgatcacgcgagggggtgagtgaggaaggttgaaggatgggtccgtggagcgacgacgggaggtcgtcgctgagttggcctagagtagaacaaggggaggggttgagtgacagacgagcagcgagcgtgtcgtgcgagggtagtacactagcgagaagggaggaagggagggcggttgtgttcagacgggtgctcagaagagagcggcggcggcaccggcggcgccaaagaaggcagcgacgccggcagcggggccaaacgcgcgctcgccggccgagaagggcgcagcggccgatgatgaggcggcggcggcggcgttcgaggccgaggcgacgatgccgcgggagctcgtctgcgagaccgaggccgaggacgagagggtaaccgaggcggacgaggcggacgagctggcggccgaggacgaggcgcgggtcgacgaaccagaaaacatcgatgacgacgagttgaagttgtcgtaggcctggttgagccgaccggtgcctgtttcagagtgcgaagagtggttggggcgtcaggtcgcgctttgggcagtaaaggcggtcacgagcggacgcaccccaggggatggcctggccgtcaggctgggtcgcattggtcggctcagtcacgctgccgtcggcgccggcgatctgcagcagttcaaacaaagacgtcgagcggtcagcgagggcagcgtggggttgtatgcgagcagggaaagtgcccgaacggtgaaccgcgtcgtccagagcgtctcgtccggctcgttcgagctcgtgaacctgcagaggataaccttcatcaactcgttgcgaatcagagctagggcctgagagcagaggacgcactggaggaagtagatggccgcgttgggcgagacgtcgggcgcgtcaaagacaaactgctcgagctcggtcgcgtcgatgttgcggccgacggctgcgggcgaggcgtgggccagggtcagcacgatgcgctcgccgccagcaagcaagaaacgacaagggacgtactggtgagagggaccatctgccatcgagcaaaagggaggaagggggcagaggcgcagtcagtgtcgggccggggcagggaggcgcgcgcgtgcgcgcggccgccgagcagaccgggacaggaggcgggacgctcaactcacagccaggttgccgccggctgacagggaggatagggatgagagacaggtcagtccagtcgagcagagagggcgcagattgcatgccactcgaggcggctcaactgggcagaggaggacgagagaaggacgcactcatgagctgttgacgcgcgggccgccaccgaacgagagcgagaaacaaggaccgtcagtcagctgtccgcctcgcagactcccttttcaaagacgcagacccgaagtagctaggagaaggcgagtgacgcacctggatcgtcatgtcggtccagttgccgttggcgtccttgtcccaaatggccgtgatgggcgagccgacgttgacgacggtctcggcgctgggcgaggtcgggttgggcgcggcccggacggccgagagggcagcggcggcggcggtgagggcaaaggcggcgagcatcgtgcgggtgagagtgagagaggagagagggaagaggtgagaaggtgaaggtgaagaaggagcgacgagggagttaggtgacagggaagggcgggcgagccgagctcaagagacgcgcctgctttgctcacaccgccgtgacaactttgggcggttcatgcgagaggccgcttcagccgcaccacatcgcaaagagctatagccagggcataaagatcgtcagaaatctcctacttcagctggccgacaagtgaaggccaggatgtggccagagggaggacaggagagaccgagggaggccaggcgttatggcgcgagttacgctgcaccgtcgcgcgcagctgcccctcacagtcgtcgcctgtcgccgcacccctttcaccagcaccattcttccctcctcccgccctcgaccgcttgaaaatacaagccagggttgccggtcgctactctcagtccaatcgctcccgtccagtaccacctcaagacagcctcgagcgttgctcgaccggcggccaacaccctccgagcttgagctcggcgccttcctcggcatgacccgcccgtcgctcgccgacgagctctccggcgccttcgacgacgacctcaagtccgagctctatagctctctcgatgacggtggcttcacgcatggcggacgggcgctcagcctcgccgaggagtttgggctcgacctgtttgacggcgacgacgccgacaacaacgccgacggcgaggatgcggctggcacgctcgaacgcctgtcggacgatcacgaccttgacggtgagtggtccgcagttcttccagcatttccgttcctttcgttacgctagttgagctgtgttgaactcaacgagctcgcatgcgctcaaacggccgagctagccctcggccggcggtcagacctcggtcgcgcctcgtccctttgaccattacgcagcctgtttctgagtctcgagtctcctggagctcgcggctgatccaggttaccacctccacgctgctccagacttcgggcgcgggaacgaccttgcacgacgacgcttctcgtttggctctgacgaacggtcgtcgcgctccgacctctcggcgacgcaatctgagcgggatggtctaacccagacccgaatggcagcatggtcgacagccgtcaacgatgatgatgccgagcactcagacgactcgacatcgaccccggccaggcctcgtcgtcactcggccagcagcgcttacgacccctcaatgacgggcagacactcgccgcacagcggcaccccggcagaacaccgctcgctcaaactctcgctaaggacgtccaacggcggccgctattcaccctcagcatctgaggtggacgcgagtgacgacgacgacgacgacgacgacgagtcgggggtccttggccggtcaaccggtcgtctgctacctccgcagcggctctttggctcgcctcccgccgccaaccgtaccgttaacgtcggcccctctttgctcgatctcggcggctcattcgctggcaaaacacccgacgttatcggcttactcaagcttctccgctcaccgagcgcggcacgagccgacgaccacctccgagcgttgctagatgagatcgcggggccgttcgtcggccggcttgacgaagcgacaagggaggccgagggccggtcaagagagcttgaccggctggaccggacgattgaccggctgatcgtggagggcgcgacgtttggcgggccgatccatgccggcggcagcgtcgatcgagacgacgacgacgacgacgactcggccttggatagcgagtcggcgaacggcagcacgggcgatggccgttcgctttccaacacatttacgacccgcgctccctccacgcctatcgtcttgcaacgccatcggacagtcgagcagtcggccttctcgctatcgacgttcgcgacgccgccccctcaaatcggccagacgaccttccatccctcccactcgcctccattcgcaacaagcacaaccgccccgcctcctcaacccgcctccctcgtcgccctctccctcaccgacctcgcctcccactctctctcggctgccaacgccctctcggccgtgcacgaccaagcccagatcgggcactctgctgcagcagagtcggcgcgccgtgtccgggcgctgcgggcgagcgtcgtgcaaatccgatctgaggaggaggcggtcgagagggcccggagggagattgagctttgggaggcggaccggagggaggaaacggcgaagggggaaggagtcatcgggaggcgggcgcaggcggagatgcgctcggttcagcggataatggaggcctttgaggcacgtatgcccttccgagctggtcaactcgccccttgatcttcgctgactcgaacattccgcctctgtcaggcccaatcgttcgcactgcgttccgagcaccaagctttccttctcggcggcgtcacagtcgtcgcaggctgagggtcggacgccgcgccgagcgatggcacgcgccgtcatcggcttctaccactctgtgagtgggacgcacctcctccttgcaactctgcccgctttatcactttgagctgaccaccgccgtcactgccgcactaccacaaggtttcgacttgagcgctcatcacactatcgtcatcaacccaccacgccgggccagaattcgtcaagcaggtctttgaacgatacgacccttcgcctgtcgggcatctatcctccgccagagagtgcgacaaggcaacgtaaacgtcatcaaacgcgaccgacgacggacgcgccaggtagcgctgcctctctctgattactactcttggaatgtctattgcggcgttctctgtcacgagcgttcttctcgacgtcttttcttaagcgagcctgcctgccatccctgcgcgcaaagtgcactgccggccgacaggacgcaccgctggccggccgaggagcgatcgactttggccgcgcgacgacggcgcctcccgccatctcgcctgccctccgaggagcgcctcccttcctccctgacatccacccaaccctcaaccccaaacagaccctagacctgctcgtgatgaacgtcaacctctcatgtccgtagtctgatgctcgagaaggagttgaggttgtaacctctggcccaaccaccagctgacgcgctgccgtgcctcactcgcctcgtcgcctcaccatcagcgcgcgagctgctcgacagctacaacaggatcctttccggcgacgagtcgatcaactggaccatcttgtgcgtcgcctatctgccatggtcgtgcttgctggcaacatgacggcagtcggctggcgatcaaggctggccgacggcgtgatgccggccgagcctcgccaatgtcgctcccttctctgaccaccttcctttgtcgcaccttcagcacctatgcccagggcagcaatgacctcaaagtccaggccaacggcgatggcggcctggaggaggttgccgacgagttccgcgatggccggtcagtcgtgtcacatctcgaagtgcctgccgagcctccaccgcgagcggtgactacgcacgcggaggctgacgttgcccatctcgcccgtccgggcccgacctgctttttgacgtcctgcagcatgcagtacgcgtttgtgcgcgtgaccgatacgaactctgagctgcctaagtttgtgcagatcgtgcgtccctggtcgctgtgacaggcgtcttgagctcacaagccccgggctgaccaccgctcgatcccgctccttcagaactggtgtggcgacggcgtgcccgagtcaaagaagggtctcttccactcgcactcggccactgtcgctgctttcctcaaggcgtcgcacattcagatcaacgcgcggaacgaggtgcgttcgatgggccggccgagctaccaggcgcgacccgactgaccgacctttctcgctcttgcttccgcaggaggatgtcgacccagaccacattcgcaaacgtctcgccgacgccggcggatcgaagtactcggttcagcagaagcagcagccggcggcagcgccgcgcgacaagattgcgccggtcggctcggcctacacgccgactggcaagattgacatgggcgcccttaaggcaggcaagccagcggcatcatcaggagggtcctccactccgtccaccttcagtaagccagcgtcaacgccctcggcagcgagcactccgcgggtttttggggcgccggctcccgtcaagcagccggtcgtctctgctgcgccagcttcgaagccagcgctgcctcaagcggctcctgacgacgacgagacgtggggcgatgagccgcccaccgcgctcaagcccagcgctgctgctgcctcggctcctattcccaagccgagcacgcccgctcccgctggctcgttctaccgcgcgccggcgccggctgctgcgcctgccaaggtcgaggccaagcaggatgtcgagaagccgaaggacgacgaccggattgccaaggtcgtgcgtagcttcagctgctggccctctcgtctcgacccgaaatgctgctgaccttgcctaaaactgttgcctcgcaaacgacagggcaccgcctacacgcccgtctcgctaccaaagcccaagaagctcgtcaacccctttgcggccgcgcaggctcttgcggcctcgtccacgccagcgtcgacgccctcgtacggtggcggtgctgcggcctcttcgtcttccggcggcaagctgacgtggtcccagcgccaggcgctcgccaaggagcgcgacgcggccaatgaggcagaaagccaggcggcgtattccttgtccgtcccctcggctgctggcaaggtcggcggccctcttggcggcgtctcggctgctgcgattggagccggcgtcggcgtcgcgctcgctggcgtcgatcacggcgagaccacgtccgacaaggaggacaacgacgaggcagaggctgccgccccgccgccgccaccctttggcgcccggcctctgcctccccgcgcacccgtcgtgccggccgatgacgacgacgagggctttgatgagccggctcccgctcctccgcctgcccggagcgccatcgtgccgaacgctgcgccctcgttcccatcggacgacgaggatggcttcgacgagccggctccggccccgccgccggtccggagcgcaatagtcgccaatacatcgccggcattcccggatgacgacgacaactttgacgagccgaccgacgtcccgcctccgaagcgggcggcgatcgtgcccaacgccgctccgtccttcccgagcgacgacgactttgccgacgacgacaacgttccgcctccgccgccgccgccgcctgctgctcgccctcgctcgccctcgcccgagccggtcgctgccccgcctgcggccgctggtgcgagtgccggtggtgggctcaaggcgcgggtcgtctacagctacgacaagactgaggacaacgaggtcgacctcgaggagggcgagatcgtcaccgacatcgaccagattgacgacggctggtgggccgtcaccaacagcaagggagaaagcggtcttgtcccggccaactacatggagctccttggcgacgaggaggaggaggcggctccggctgcaccgcctgttgctccggcccctccgcccaggccagtcacgcccgaagccgcgccagcgcctgctgctgctgctactgccggcggcaagatcgcagttgcgctttacgagtgagtgctgccggcctgctcgtcgcttgcatgtcgctgacccctttcaaccctcttcgcagctacgacgccggcgaggacaacgagatctcgttctgcgagggcgagcgcatcaccgagatagaggaggccagccccgactggtgggagggcaccagtcccgacggccagcgcggactcttcccctcggcctatgtttcgaccgacgaacagtgatctttgacccgcacgatgccatgactgctgatgaccctcctgcgttgggacagagcttcgcgccagaatcaatcgaacgaggggaaggggcagagagggtgctgcgctgcggggaacttcacgcgcgcgcgcgggggcgcgcggtcagacttcagccatggaacgcgtcgcgcggcagcgccactcgggcgtgccgcccgtgcgtcccgtcggctcttgggcgagcgagcttggcccgcctgttcggagagacctctgcggctgatctgtctgcacaagcacaaagccgcgtgtttttgcatggctcggctcgggaggagaggaagccgctcgtccgctaacgcccacccaacgtcgctctgtgcttctgctcctctgctgccttctcctcatccgaatcctcctccaacatgcgtcttcccttctccttgacgttcctcgtcgccggcttattcgccttgagcgtcgttcaggcgttgccgacgtcgacgcagggccaggtcaaacgctgggccaaagcctcgcccgcctggggctgcacgtttgtgagtctgaacagcggctcctcgttgcctgacgcgaatcgacgaactgatttagcttaacttgtaggcatgcccggtgatcaacggcccgaacggcccctcgaaaggcacgcccacccaatacaaggctgactttacgagttgcgagtgcgtcctcctctggcgcactctctgtcgcttcggcgtgtctgccttgtcgctcgttgacagacgccgtgacacctcaggaacggcatcttctcccctcatcagtaccgccagctggtccactgcgagtacagcgatcgtgagggttggcgcgcgagcggcaactcggatctgtgtcccggcggcgcacagcaggtctgcggcacgcagtcgaggcgctcggtgcaacacgacctctcaccgtcgagcggtacgtgctagtatcgttgagaggctcgtagacgggacgcgcctgacgtcttcagcccggtgtttcgcttccttaggaacttcaaggctcgccagtgggtgcccaaaagggccgccgccgaccgatgagtcgggaggccggggtgcgtgcaatgctgcgatttgcgtgtcgatcgactgggtgctgacctctgtcctagctcgcagctctcgtctcagcccgccgtcaatcgaaagagtgcacgatgcacatcgtgacataggtccaattagatgacgacactcgtcatctctccgtcatcgtccctccgtgagggcggcgggtgctggcctggcgcgtcgttcttggtcaccagctgagcagcgggagcgtcggccgtcgggctcgacggccgcgttgtcgggcgcgaccgcgagggtagcgctggcggtgcagaagcctccttcttgtcgaccgggtagccatgggcgtccaggtcgtccgcaaaaggagggacaccgggtgtgacgtcgtacgagggcgggagatcgtcgccgtggggcggcggcacggagtccgcagccggttccgagacgaggccgaccgcgccgggctggccgtgcgggtcgagatcgcgctcgatctgctgaagctcggcagctgagacgccgccattaacggcagcaggcggagcgtccgtcatgccggcgggccgacgagtcggcagtgccggtggcgggagaatcgacgccgccgcaaagcggtcgttgaagtcctgttcgtgctccctccgttcgctctcggtcatgtcggccgcgtcgttgaagccgatcaagtctggcggcgcgcgcttgatcggccgcttgtcatcgtcgcagtcaccgccctcgcccgaaggaggcgtcatgctcggcgtcggcgggagcttgagcacctcgccctcagaaaggatgagcgagtcgggcacctcggggtagacgacgacgtcgagcgagccggcatgcttctcgcgctgagcagcgcccgagcaggccgcctggagggccgcctggaggttggccgcctctggtggagagcgcactttgccggcgaggatgtctccggcgcggatgccaggccaatggctgcgagtggaagcgcaagcacactcagcccagttctagtgattgtggctcgatcagagtgaagaaacactcgctaaaggcttgcgttctcgtcgaacctgtcaacgaatacctggccgaccatctggacgcccacatagaggcctcggctcttgacgtacgacaagactggcgccttctcaagcccgacctcaatcgcggcgcctgcgccgaacggaccggccgcgacgccgatgtcggtgccgagcgtcgccttgtgcgaggcaaacgacttgagcgcctcgggcgtccggatgacgaggacggcgtcaaagatgtcgatgccgatcatgaagcctgccgtcagcgagttgggactcatcgacgacgggcccgaccacgagccgtcctcgagccgagcgacgactacgcccgcgcccccggcaccgccgacgaacgagaaggcggttcgcatgctcgtaaagatggcgaggccgcaggcgttctgaaggacttcgggagggatcttccggagcaccttgcgctggcgcttgatgcccttgacttcggtctcgaccgacgtctcgataccgtcgacggtgaatgcccggaggatgcgagctgccttttccatctgctcgggaaagtcccccgtcactgggtagaaggactcggatcccagctgacgaagagggggttgagatgcggttagcccgcagctcagtcagcgctggcgagcagcagcagccacgactgacctttgcagccgtgttgttgacgtgaccgccaacatagtccgaggcaacgatggccttgtccatcgccttggatccccagacctttgccttgctcttccaaccgccgccgctcggtgtggcggccgacgaggaagatgacgaagccgcaggggaaggagccgaccggcgtggcggcggcggcggtggcggagcagacatagcgctggtgccgagactgctggagaggagctcctgttggcgggaggaggcgttggtgctgcttctgaagactctgtcgtcgtcgtcgttgttgaggtgctgggaaggcggccggccaagatgtctcgacgggccgaagcggcggcgagttcggccggcaagcgtgggaacctccgactggccccgcgcggcgaagaccgacgccttgctgctcatcgaaagccccctcctgactctgccatccacctccttaaagcctgccatgagcccacgatggctcccctcgacacgcagaagcagcaacagcaagagcgggcagcggccgacctgctcgcccgagagtctgagctcgaccgagagaaggcggtcgatcgcgccgaggccgacggtgagctgagggcggcgaccgcgacagccgacgagccctatgcaatctaccgccgcttctcgcgtaagtacagcttgtgcctcaccggaagactgcctgatgctgacttgcaagcctatgatagcacggcagaaggctctgtacgcagccttgatctcctttgccgccttccttgcgcgtcagtcggcttggcctttggcatcaagctgccagcgttcctcctgctgattcggcctttcttctagcgatggccagcgcagccttcttcccttcgattccgactgtcgcggccgacatgggcgtcagcggcgaggtcatcaactatctctgcgtcgcgctctacatcgtcggtgagtgtctcctccgaaaggcgactctctcttcatctgaagactgacagtccgctcccgtccacagtcctcggagtcgtcccacttctttgggcgcctctatcaggctactatggccgaagaccaatctatctcgtctcgatccccatctttgtcgccggctcgctcggctgcggcttctcgacatcgctcggcgccctcgtcgcttgtcgcgtgctccaggccttcggtgcgtcgcatcgcataggaaggttgcgcacttacgactcgctcgactgaaccccgctctctgtgactggcagggagctcgagcgttctatccgtcggtgcaggcacgatgggcgacctctactcgcccctcgagcgcgcatcggccatgggctggttttacatgggtgtgctggcgggcccgtcgttcggcccgctcattgcagggtgagcttgatcgtctcttccccggctcgaaacaagtcgctgacggctgcagtacgtctcttccaaagtatcctgcaagagtacacgagccaaggatggagggcgacccagttcctcctcgccgcactcggcgccctgtcctggattctcacaaccttcttcatgtgcgcccgtcgcgcctccctcttcgagcatgaggtcagcgctgacaatgctcgttcacgtctcaggcccgagacctggcacggcccgacgcctcatgcgcttgcctgcgaagcgaccggccggcgcttcgtcctgttctgcttcaatcctttccgggccgtcgcgctcctcaagcacatcaacattctccttatcgtcagttcgtccgttggtgcgccagccgtcgcacaagtctgaccttggtctcacgcagagcctcaactcgtccttcatcctcttgacaacctactgcctggtcgtccctctctgtgagcagtctatcgcaacgactggcccgcagctgcttcactgacgctctcaaatcggaaatcgcagcttacacgctcgcgccgcgcttcagcatcaccaacagtgccatcctcggcacgctctttgtcccgatcgggctcggcaatatcctcggctcgcgcttcggcggcctctatgccgactggacggtcgcccgctggatcgcgaaacgcgggtaccgccggtcggaggaccggctctactcgacgctcgtcggcggcgggctgctcgtccctgggtcgatggtcgcgatcggctggctgaccgagaccgcgaagggcgggctcgggccggtgctcgtctttgtgagtcgtccatcctccgtttgagctggtccgtcgggcgctgatcgctgagatgctttttcaccgtttcgtcgagcagtacttcatcagtggcgtcggtcttatgttcgtcctcagcagctccaacacgtactgcgtcgactgccttcgtacgtcctgcgccgaaatccgcctctccccgcgctaacctacagtgctcgccgcccgacctggtcagagtcccgctcggccgaagtcatcgcaatcaacaactgcctgcgctatcttgccgcggcaggcgcgtcggccggcatcctcccgctcgtcaaggcggtcggcgtcgggccggccaacagcctgttcgcgggcatcgggctgctcggcttcatctgtgtctgtgccgtcatacggtggggtatgtccgagcacggagctcaacaaccactctcgtaagcccgggctgacccacacttggaccgctcccgtaggcgaggcgatgtcgggtcgaaccgtcccagagatggccacagccatgacgaccaaagtcgaggccgcagcgacgccgacaacaagcggtatgagcaccgatcgacccctatcggcgtcgtcgtcaaccaagaacctcgcatctcgtccggacggtcccttgccacctgcatcgccttcgactgtcaacaaggggcagagcagcgaccggcatccgggctcgacggcgacggcgaccatgttggccgggcctgggcctcatcgtcctcgccgaggaggcggcgcatgagtcgtcgaggacgtcaaccgccagcagcagcagcacgaggccaaggccgagagcctgcgcgacctagcccggaccgtgtcgctgcattaggcatgaggggcatcgtgcccagacgccactcgcgtcgtcggcggcatgtccaggcagccggtttcaggagggaggcgggcggttgaaagagacgaggcaatgatgagtcggtcgcgagattggccgagatggccggtcgggcgcttctttcgttcatactgtaaaaagatggcctcccggttcgtcgcaagggtcggcaggcccggcgctttcgactgcgtcctgctcagcagcgcagaggcagccgtcggcaggccgagtctcgactgacctgttcccttgccgatgcctgccgcagcgcctctgctcgcttttcgcgattgatactcgccccggatctctctcccgttgcaatatcgagctcgcatggtccctggcctggcagtgcgatagggtcgaggctctgcgcggggggacggccggaaggcaaaaggccccgagcgcagacgtctctctgacccgacccgaagccgccgccttgaccgccgtcgacacgtcgcccggctcttcctctttccttctccctatacatacacgactcatacacacgccgcggcccgacctctcctcctcctctctcctttctctcacgaacgcacgcctggacgcctcggaccgatgtcgaacgccatgccagaggacctggccgagatcgtgcgtggcgtccaggccctttgtcctcatcccttcttgcccgcctccctcctcgccggccggccgcctgcctcgcagcacgagcctcataggctggaggacagccgcattctcctctcgttaccgtcgctgggctgccagcggtcgtcggtcgacggccaggacgtcttggcggaagcagcgggttccgggcgtggcgcggccgggctggccctgctggtctcgttcggctcccccttcctccaccccgtctgccggccttgcaacccgcctgttgctcgcaccgtcgctctacgcacgcaggaccgcattagcaaccgcaggctgacacatgctttctccttcttctcccttgactactccgtcccggccgtgcctcgtccaggattcgacgccgctgatcgacatggagatcctccagcagctgcaggagatggatgacgacgatgacgagcgcgagttcagccggtcgatcgtcgacgagtttcgcgagcaggtgcctgagcagctcgccatcatgaagaaccacctgtgcgtccttcgaatgggtcacagcgcgccgggcccgggatcagctctgcggtttgctgccggcgtgtgctgacccccccaccccgcaattgctgcttcctctgggcagggatgacaaggactacctccaggtcagccaggttgcccactttctcaagggctcgtcggccgcactcggcgtcgcaaaggtcgccgccctctttgagctcatgcaggttaaggccaaggacatctacaccgccgtcgagtgcgtcacgctcctccaactcttgcctgccttcgctcccgttccgtctgaccatcatttgcttgcggtgcgcctcatcagaggttcggtagcatccgccgcctcatctgcctcgccgcccttctcgccgaccgacgccagcctctcggccgagcagacggcgatcgtcgccgccgctaaagaggctggcctcgaggccgtcaagtcgaccgtctcgctcatgcagattgcgtacgaccgggtccggaccgagtacacggtcgccgacgactggctgaaggaggagtatccggagatcgagagcgacgacggaggcgacgactagcgaggagggcgtcactggctcgtcatcgcgcctgcggtttccgtctcactcctcctcgaacggcctgccgtcagcaggcgacccctctctgtccgaacaaaaaagggccgctttcatcatccctcgagcatccggtctcccggcagcgggcgccaagtatctccgtgactcggcttgcaggccctccggccgttccctccccaccaatcactgtatcaaggtccctgccgccaggcaaagcgggccaacccgaactctctcacctcttcctcctcccctcgcatcgtcgtcctgcggcgctcacttagattgccctccctctcctccctcttcacccgcttacctcctccgccacatagcaaaagcagatctctccagtccttttcgctactgcccgtctttcgagaccccattgtatccatgtttcggctctgatcatacccgcaccgtcagaggcctgcagcgatgagggtctgcgggcggaggaggtggcgagtctgatgtgagcgcgcctcctcttgcctttcggccacttttgggactgcacggggcgctgtcgagactcgagaccaaacggagggaaaacccggccaggccaggccagagcaacgagttctgcggaacgcctctttcgtagggcaggttcgccggcgggcggctgctgcggcgtcgatcgcctgcctcggacgaggacaaccgtcgatgccgtcgtctgaccgaccttcgagggaggtacatgcgacggacggagcagaggcagcagcgtcgacagagccattgctagggcagaattggatgacggtatgcgagttgcaggagaacaagggaactacttgtgcagccgcatcaaggctgtttcaggagccagactgttgaccgacgcccttcccttccgacctcgaccctcttcgccctctaatctcgtctctctccttgatcgctggccgatctaatactttctctcgtgcgtacgatcacggcctgctgctcgtccatctgccgtcccacttgcctaacatcgtctcgccgtcgtctcagcacccaccaccgttctccctcaacatcccagcgccggttcgcccctccctcaccctcaagcatgctcttcatcgcccgtctctcggccctcgcagccctcgccctcacgttcgcctcggccgcgccgctcccggctggcctggccgccgaacggcgcttcgacctcgtcaagggcgtcgtccggcctggtctgggctacgtgccgaccgcgacgatcgagctcgccagcgcgccgaccgaggtccgtctcaactcgctcgtctcatcgagccatcctagtgctgacctagtgctctctgtgcagctcccctcgaccgacgcctacttcctcctcccagacgcgcttaacctcatcagcccgcgcgctaaggccgccgacgcagctgagctcgccaagcgcatgacgcgcttcctcctcgtccggccgggcgggatcgacgacgacggccggctgccagagtttgtccgcctccagtcggccgaggaagacgaggctgagcggcatgcggacatggcggtctgaggcgggctctggctctgatagccggctcggcgcaaccagagcgtcatccaacaggacggacgctcgctcactcgcacgaggtccagccgagctcccagcacctccccatcctacccccccccccaaagacctcccggcgaggtcactcgagagagactctctgttgtaaaccgccctcctcccctcttatcacatctaatggaaaccctcaaagcctgacgcggagacgtccgagtgaaggaggtggcgcaacttcatcaggcgcacaaggacgaaggaccggccgacagtcctcgatgcagggcaaagcgaagggcgagcaagggggagacaaagtgaggaacgggaagggcgagtccttctgcgaggtccctcagtgagtggcatgcccgcgcgcgacgcggcgcatcttgcggaagctgctgcacgtgttggcgcaggccgaaaagtcgacggcgcccccgccggcggcggcctgctttacgttggcctcgtccaggcagacgttgtagagccgcatgcaggacgagtctgagcgagcgggcagaggtcgggtcagcggaggttcgtagaggaggagcgcgcggggactgacagtcagtggcctccgaggcgggagcgacgggcgtcgtgacggacccggcagcgggaccggcagccgcggacgtcgatggagtagcagcgacgtaggtcgcgctggagacaacggccgaaggggcggggacaacgggcgcaggggcggacgaggactcggcgacgggggcagcggacgagtactcgtcggcaggagcgacggatgagtactcgtcaacgggagcggcgctcgcgtactcgtcatcgttgtagacaggcgccgaggagggagcaggggcggaaggagcggccgacgaggcgaggacagcggcggcggtggaggacgcagcgaccggggcggcagacgtcggagcaggggcggcggcggcggcggaggtcgcaggcttggcgggagaagccacggcgccgtcgtaacagactgtcaaaagggtaagagagcgtcagtgcttggagggtctgaagagttcttgacggaactcacagccaggctcggcgaggccgtctagcggcgtcatgcactgcgccgtcggatacgtagccgacccgtcccagacggccgggcccgggatgatgtagtcgagcttgacgtcgtaggtgggcgagtagtaaatgtcccaggtgatgcccggcgtgttggccttgaaggcgccggggatcgcgatgccggtcgggagggcctgcgagccggagccggtgacctcgagctgtgcgcaggacgggtagaactgcgagcggatagaataaggaggttaggcaagagcgtctaagcaacgaccagaattggcagtgtcgttgcgcacctgagcgccgttcggcggggccgtggacgccgagtggagtgcgagcaggtcaaagcggacgaggtacttgcccgcggcgagcgtcgaaggcagtttaacggtgttgcgagacttattcttgatcatgcgctggacggcccagtcgtttgtcgcggtcgaccatgcctcggccgcaatcttgacccaaacgtcgccctcgccgttcgactcgtatctgcgaagaggcaagccaaggtcaggaggtgttggcacaaaggagagccgagagtgatgaggagagagaggagacgaacggagcgatccaggcggtgatgggcccgaggtgcgactcggcaatggcgtcgacgccgcgcgtgccgctctgcgtccactcgggctcgagggtgtcgcccgggctagccgacagccagccatcgacggccatcttgccgttgacgttgcacgccaggtccgacgacgtgatgtcctggacgggcgagttactcttgggcgagcgaactgtggaggagagtcgtcggtcagcagagggacgatcggagggaggcaaggcagggcaggggaaggacgcactgaacgacgccgtcgtgccatagtttgtgctcgccgcgtcaaacatgtcctcgccgttcttccagaccgagaggacgtaggcgtgggcgttgaccgaggccgccagggcgagggtcgggatgagggccttgacgagcatgctctcgagcgttaagggagagaagaagaggaggaggagggaggacgagcgggtggctgagcctgaggccagtcggtcgagtcgaggcggagtcagcaaaggtcgagagcgaaggccgaagagtaaggaaagcagctcgccgtacctgcagcgagaagatgggtcgagccaggaagccgacaaggaggaaagaatgaggaaagaagagaggaagggaaggagggaagcggacggaggggaagaagagctcgaagaaaggcctcactcgcgagactttatggccgccggcccgggcagctgctcggcaggagccgggctgcaacatgtgaagcgaaagggtcgagcaaaggggggccgcgaggacaaaggggcacgcccggccaggttgtggccagaggcgagcgggcgcgaccctcgtttcggcctgaaggccctgcgactcctgaccgcagctgcttccttggccggagcgtgaaggacgcagcgtcacgcgtgatggccttgacgagcaagagggaagccagaggctgcgccaagactcaggggcaggagcaggaagagcgcctcctgacgccgcaacccaagcagagtcgccccgccgatccgggacctgtagaagacgccccttgctacgaagtaataactcggctaggcagctcgccaacatcgccgaaggtgagcagctcaggacaaaggggtcgggcgagcgagggagctgccgaggctgcaccgtgcgattcgcctctcgagccaggccggctgtaacgcgatgcgaagtcgcaccgccagtcagcgaccgtcggctttagatgcgacatcagcttctgactctagcggaaggtcgtgcgtcgtctctggccgttcctcctcagacgatcgattcatgcggtctggtctgtcggccggcctcccttctcggccgcagcgcagcatgaccctagcgttgttggcttgagcgtctcgcgccggcccagaaggtcggccagaagtcgtgatgactgccttctcaccctatgactgtccgcttgacaactgcgaggtactggctgctacgggctggtcgagcttcgtgctcgcttgctctgccctcggccgaaagggccggcggcgcgcgagtcagcctcgacctctttcagcccagcgccctgtcctcctcctccttcactttcaacctcgccatgtctctcctccggtcctccttcagggctctcgcagcaccccgccaggccctcgccgccgcctcggtccggtccgtctcggccgccgacggcggaaaggtcgtcaagcaggaggcgacgaccgcgggcgagattgacccggagaagcagtcgctcgacgccgccaagaaggcgggctcgccgctcctgcactcgtcgacgtcggccctcgactgtcaggcctgctctctgtctcccgtaggacgtcggtcggactaatgaggctgacctgcaagcctctcctcgctccctccagacaagctcggcaagcactcatcgagcggcttcccgccggccctgcccgtctttacgccgtcgaccaagacggccgaggaccacgtccttagcatcctctacaacacgcctccgccaagcaccgagccctacaagaagtaagtcgttcaagcttgcgcgagccttctctcgtgcacgcagagggagtggcccttccggtcggaggagcgaaacgcgcggctgatcgcacggcctcgccctccgctctcgacccccaggcacatcctcaactgcctcgtccaggacgagcccggagttctttcgcgcgtctcgagcaccctcgccggccgtggattcaacattggtctgtgtctccaagctccgtctgcatctcccgtcgccggctgacctcccgtccccgcaccgcccgcccgcagactcgctcgtcgtctgcaagaccgagatccgcgacctctcgcgcatgtgcatcgtcattcgcggccaggacggcacgatcgagcaggctcggcggacgctcgaggatctcgtccgtcccctccctctgcagcggcggaacccgagctcgcctacgcagatgctgactcgcgctccgtctttttgtcggcaggtccccgtctgggccgttctcgactacaccaacaccaacgtgatccagcgcgagctcctgctcgtcaagctctcgacgctcgggtacgttctgcgagctgactgcccgcctacatctgtttcgacgtccaattcgctgacccgccgccggtgtcgcccgcccgttctcgcagacccgagtacgtcgagtcgcagatgacgtccggtccgtcgctcatgccccagagccagtcatcgcactcgctcggcgacctcccgacgccaggcggcgagcagacggccgcgcaggccgcgcacgagcagaccgaggccgaccacgcgcgggccgaggccgagcgggcccagcaggcccagttcgaccagcagcgcaacctcctctcgcactctgaggcgctgattcgtcagggccagcacctcgcggcgatccagagcctgtcggcccagtttggtggccggaccgtcgacatctcggcggcgaccgtcacgatcgagctgacgggtaagaccgagcggatcgacgctttcctcagcctcgtccggccttacggcatgctcgaggccgcccggtcgggtacgtctgccgctcctatcgagcaaaagcgcagcggctgaccgacccttctctctcgtcgtctccacccacaggcgccatggtcatgcctcgcacgccgatccccaagcacccgtctgacatggacgaggctacctcagacgcttacatcatggacgcctcgctcctcccgcccggctaaagcgatcctcggcttgcccttcccccctctaaaaccgcgtcgaaacagacgcaagtgttgtcacctcagatcctccctttcgccggatcacatgattgtagagagacggacgcatagtaatacgacggcgggagatggggcatgacggctgggcgagggtatgagtagacgaaggcgggtggacgagagcgcggcgagcaggtcgggaggcagggcggcgagcaggcgagcgagcaggggtcgagagtcgattcgggccggcgcggcgcctagtcgaggcagatggcgccgtcctcgtcgattgcaaactcgaccggcggctccttctcgacctgcagcgccttggcccgcttcggctgcgggggcggcgagcccgtcgacagccggcgctgctgctgctgctggtccttcttacgccgctcggccgaggcagacgacgggccagggcctgggctggcgcgcccgagccggtacgcgccctggccgaggttcgactcgccgccgctcgacgaggtggccttgtgctgcgacgatgatgaggatcgcttaggcgttgaaccgctcgcggggccaaagaaaccgttgagcgttacttggccgggtccaagctggccgtttttgcgctttacgctcagtaagttgatgcgggcaaggagagaggggcaggcgagtgtcaggtactcgagcatcacaggcgaggcgacgcacgtcgtgcgagaggcacgagctcttcctcggctgcgacgcgagcgcatcctcgtcgtcgtcgtcgtccgagccgtctttgtgcttcttgttctcgcgggcatgcttgagggcgttctgcaggcgagagggtagccgtcagctaccgcaccgcccgggacccgtgctgagcgagagtacgcaccctgagttgctcggcgtcctcaaagaacacggccggcttgtggacccacgggtcgagcagtccatcgtcctgcgcgtgcaagcggccaaagcgaggagcagtgagcgactggatcacagcctctgtcccgagccgaaagagacgcgcaccttgtcgaggttgaggtagtgcctcagctcgcaccggcaatcgcgcggccgcagcgcaaggtcgtcgatcgggcagtcgaggatgtctttggccgcctcctcgtctcagacgtcgtcgaaccagaccctggccgggaaagcaatcggaggggtgagcggcctccgacggagaaggagaaaaggccggccccttttaatgagttgagggccacgcactggaccatgtgcttgtatttgtcaccgacgccagccggagatatgtgcgctttgacctgaagtgatcagagcaagaagtgcgattggtcaggccaccgagaaactggccacagaccgccttggaagaagactcgccatgtacgcaggcgtcctcttgagcgagccctcaatcagcgactcggcgagcgtcgtgaagatcctgaaataggcgaggagatttgtgtcagctacagacagctgatcctcgcgaggtgagggagctggaccgtacttctcgacgcgggacgagacgctctggaacgtccagtagccgaccgccgtcgtccgctcggcgaggctctacagcttgaacatcgtcttctccttcggctagaagggcagcaatagtcggagacgtcagcttcgagtccagaggcggggacgtcggccggcggggtcactgacctcagtcttgagctgcttcttgctcggcttcttcttactcgaccgggcagggatgtcgctgtcgccatcaatctcctccatgcgctcctcaacccggttgactgcggtcgtgaatgcggaccgtcagacagcgagcgatctcggcggtaacgagggcggagcgacgaggtgaaaggacgcgacgacacacagatcttctgcccatcggccttgagccggtcgaggacttctggctcgggctccgggtcgctcgtgtcgagccggcagacgacgacccactgaagcaaacgaggagtagcagtggacgtcagcgagctgagacgaggtcattgctgaaggctggctcgacgggcggggaggaagcgcagctggccggatgaaagggaggggaagggaaggtgaaagacggacgtgcgcgccgttgtagtccttggtcgtcgatgatttcttctgcggaaggagagaggaagcaaggaggcggatgaagccgaggaagatgtggtcagcagcagttttgagcggcgaggcgtggcgaggtgaggcgcggtcgcgagagaggggggccatgcctggtcgaggaagtcttcgaggtcggtcaccgaccggcctggctggtagatgtgggtcgcgtgcgtgtcgaaacggtcgtactgcttctcgtaggacggcatggccgcgatgagtgaggagcgggtggtggtcggtagctcgaggcgaaagaggagcgagatggtgaagtcggcggctcaggggctcggccgtgcgtacgggccccgcacgtcaccctccactttgcgccgacgatcttgcagcctcccttttcgcggccctgtcccgctcttgatgtgcgcgagatgctgaaccgtcgactgtcgggctgctgttggtcaaatgggctcatcgtctgaatgccccggtccctgctgcgcccgccctcgacgcttgtacaacagacctctcctgcccgcccgaccgcaggccgaccctcagtcgtccccgacgccagcctggagctggccgacgtacgaccggatgacgtcgtggccgtcggccgtgacgaaaaacatgcgctttgccgcgccgacgtcgtggaccatcacccggagctgctgggcatagtcgcgagcggcagcgtactggcgctccgaggtaaagtcggagtagagaacgcctgcgaggggaagagcgaaggtgtcagtgacgatgcaggaaagcaagagaaaggtggctcgttgaacgcaccctcctgcttgaccattcgccggagctcggcctcgtagagccgcagctgatcctggaccgtcaccgggagcagcgggttctatgaaaatttccgcaagtagggcgcgtcagcttccttcgggccgttcggacgggatgaatcgacgcacattccggtgcatctgtggatgcgcatggaccgtcagatagctaataatctgcaagggcgaggaaaagcagtcagtgcgggtctcgcggtgcagatggcaaccgcagcagttctcgcacctgatcggccgtgatgcccttctcgagcgcgcccttcatcttgccgcgcgtgatctcgccgacgaccatgtccggaaaccgcgccttaaactggacaaacaggttgaggacggcaatctggagcaggttgctcgtgtaggcgtaaacgcgaaagttggtctcgacgatgatgaagccctgagcttgcgcggctggctcgcggccggcgccggtcgcagccgtcacgagcgagctcgacgacgtcgggaaggcggtcgagtcagattgcgagaaggccgaggacgagagcgacgaggcgagccgggttgggtagaagcgctttgacgtctttgaacgccggtagatgaagcccgtctcagcgaggtcttcgagcattgtcagctgggtcgccgtcaagttttcggtcgagtagccccgcccgagctcgaggttgccgagcatgaagagaaatgcaagcgcctcgatcgggtccatgtcgcgatcctgcggcaagagggtcgggtcagccgagacgtcgctcacgacaaatcgttcaatcagtcgcaccggtgcaagccggaggtagttgagcatgaggtcccattgctgcgtgtggacgtcctcgagcaggaactggaagccgcgcgaggtgatctgcagccggtcggccgcctttgcgagattggcgcctccagacctggacgaagacgacacagcagagcaaggggatgggctcagctcgggccgtatcacagaggctcgccgcgagtgctcaaggacgcacgggtcggccatcaagcccgagttggccagcagataaagcacgctcgccttcggcgcctgaccgccaacgtcgacctgcccgcccttcgagaccatgaagtggaggatcgtctcccacttagcgacggcgatcgcgtcgagctccgccggcgttttcgagtgcttgtcctccttctcggacgggacgccaaacgagagatgtgctcctctgcaggggccttgtcgggtcagctcaacgcgcggtggagcgcagatgccactcagatagtcggacgcacccgcccgtcagcgcgagccgaaggttggctcggaacgtcgccgtcaatgaaatctttggcccgcgcgagctcgacgtcgtctccttgatgatatgccggtgctcaagtagcgcgagcgtcgacgcctgctgcctatatccgcatatcattgagacgcgcgacaggcgtcagtcggagcagggtgcctggcagggtaaggggaaggacgcacgccttgccgtcgggtgtcgagagccagacgagcaggtcatccttacgcagtggactctcgagccagagcaggctgaggacaacctgtcttgctaacggcgtgagtagcctgtatgaccgacacaagcgatgcaatgtgcgaggattgaccgggacggccgagatgggcagcgaccaagcggattggtccgtagggagggtgtgagcgggtcagctcgcgctcgataggcctgctccgcccgccagaccagtgagaggtcatgtcaaggagggaccatccgcaactgcacgcaccggaagatcgacaaacaccccgccggcgtcgagtagagcctcgtgagcgtcagctgcgactgcgagtcgaggtacgagtggatcgagctcgtgaaggccgagctcccatcggcgctcgcgcctgaggacgggccgccgaccgccgggccggggggctgaaccatcgagttgtccaggacgagctcgcactgaggacgagccgggcgatgcaggggcgagcggcgggtcggccgaggcggctggaggcgaggtcgggagggcgcgaccaggagcggggttcgccgagggaggttgggctggcgcctgcctctggacggacgcccgtggatgcagggaggtcggagcgagtcaaagttgagcggccggctgatgtctgcggatcaaactactgcagctagggaaggcaagggcgagcagggaggcgagtgggcaggagatgatgacggtcggcggtctctgacgcgacgccttcctcctcccgaccagtctcgtttcgcttgggtatttgaacgaggatctctgacctcttttcctttggcatgatgctggcgccaaggttaaatgagcggccaagtcgctcggcaggcacgctcggcaggcaagggcgaagaacacagggaggcccagccttgagacgacctcctccgtctgccatactggcaccgcgcgaacgggcagcggctgaagcacttcgtcatcgagtacactcatctcccgtctttcccagtacgctcacgtacactatcccccaacggcctgtcgtcgtcgtcgccgacccccgctgccgaccgaccgcgagctcgccccgcgtcgatctcctcgggcggcactttatgcccgcttgacgtcggcggcgccgagagcccgcgtaccgggcacgttgtacgggttgaacgaccggtcgcagttctggtctgttgagtgattgcggacgggcgagaggtagggtgaggaggttgaggggtcagctcggcgggcgagcggatgagcgcgagagaagcggagacgagagggaggttggactcacaggcctggcccattccgaagccggtggcgagcgcgacgggccacgtccgacctgaagtacgggaaaagagagacgagcaagcggtcgtgaagcaggagcaggcgggtcagccggaggttcctggccaagcgtccgagccgatagctgtggacgcacgcttgaacatgatgactgagagggcgacgccgaccgagagtccgacaccagtcttgacgacgaggtcagccatctgcgagcgcaagccgatcaaaaggagtgaagggtcagcaggcgaccatcttgcctgtgagggcagaggcgagcacgagggcgctggtcgagcggcgctcttgcaaggcacctctacacggcgagcagcaacggagagcaagagagggctacgcacgcaggcatcaaactgcagcaggacgtcatcgcgaacgagcaggatgtcagcttcggtccctgacgaaggcacctgacgttcggtcgtttcgagggagcaaaacccccagggctggcgatgggctgtgggtgggtcggtcgcgcgcaagggacaaacctttttggcgacaatgtcctcggacgggatctggacggccggagcggccgatgctgagctggacgaggaaggagcagacatgacgggcgagtttgagggaggcgaaagcgatggcggagagggtaagtgaggcggtcgtcgtcgggcgtgagcagcggcgcgtgctgctgggcctgtttggcgcgcgggctgccgcagccgacctggacgatgccgctgtccgaccctgctccctttctcctgaccatcaccttcgctcgagcacactactgtttctttgaccattcccctccaggttagtgcaagaagcatgccacgaccgagagctctggccgagagagaggcctttgctagcgctctcggctcccgcctcgtcgtcggctcctgtgacgcgcctccgtgtcgcctctttgcccctgacctgaccaccttcgcccttcccactatcctctttgtctcgacagcacgacttctctgttgcctacgagccacactctcgctcgaccgccgactgtctgccgcgaaccgtcaacaaagccctcctgttcgcctgctcgcgtgccgccctcgagcgcccgacttgcacctgaccggcttgctcagcctccgaccggtgcgtccgtcctctgcctgcgccaaccgtcgagaggtggccgagctctgtactgccttgctctgcttgggatgttggccggctgagctggcgggccagctctggtcgaacgcctcgtcgagctgaaggacactctcacttggcaccgcgccgacgatgacggcagaagtacccggctcgtgttcgcgctctgcgggacctcactgacctctgctggctggttcaatccttccaggaagacctttcgaactcgtcggacctcttttcaaggcgagccgaccgtcgcgcgaccggaaaacgacttgccgacctgccgatcccctgtcgaccgcgcaacgaccagctctctcggcctcccttcagcagccggtcctttcgctcttcagccttccttccagatgggctccccaccctctctcaatcgttccaagtctgcgccgaaccgtcggtccgacggtccaaatccgcccgaggcgcctccgctgccaccgacatcatccgccgctgtcgccgccgctcgcgagccgcggaccgtccttgagtcgttcgtcatcgacggcggaggaggcgagtcgtcatcggcctactcgagcgggactgaccggggcggcgtaggcggccagggctcgccccggtacccgacgacgccgacgctctacaaccggacgccgttgacgccgcagttcccgcagtcgggcttcggcggcgggcaggggccgagcacgagcccgtccggcgcaacgtcgtactttccgacggtcacccacgaggttgaagagcgctatgcggctcgaacgtacgacgtcgacctgaaggaggaggcgtcgtcgtcgtcgtcgtcgtctagcttgctctcatcgagcaagggcctcgggccgccggggaccaacctcaacgggccgaggtcgtttcaggacagagaggccttctggctcacgatctactttgtgttcaacgtgagtgcgggagctgccggccgctactgattgagggccctctggctgaccgagcgacctcttgtttcggcttgccctcgcagctcgggctcacactgttcaacaaatttgtcctcgtctcgtttccgtacccctacgtacgtctatcaggctcgtgaaccagtgactggcatgaaaacctcgttgaccgtcgaccgccgccactctctcgcgaattgcctcctcgccagaccttgacgggcatccacaccctctcgggctgcatcggctcgtacatcgcactcgaacgaggccacttcgtgcgtccttcgcgctccttgggcattcgacgactgcgctgggttcattgctaactcgctcgtttcgaattccatcagacgccagcgcgcctttcggcggccgataacatcaagctcacgctcttttctatcctctacacggtcaacattgccgtcagcaacgtctcgctacagctcgtcactgtaccggttcgtccatcccatatccactgcctcctcgcaagcatcgtagactgcccctgatcgccacgtcgccgccctctagtttcaccaggtcgtccgggcgtcggcgccgttcttcattattgccatctcggtcgtcttcctcaagcagcgcatttcgtcccgcaaggtcgtcagcctgctgcccgtcatgctcggcgtcggcctggcgtgcgtcccgcgtcgtgtgtttcagcccccggagacgcgctgttgaaccctcctctgcctgctcgacgtcacccaggacctacggcgactactcattcacgctcaccggcctcctcctcaccctgctcggcacctttctcgccgcgctcaagacgatcatgaccaacgtcatccagacgggcagcggcggccggcttaggctccacccgctcgacctcctcatgcgcatgtcgcccctcgcctttgtccagtgcatcctctacagctggtcgagcggcgagctcgacaaggtcaggtactttggcgcacacgagatggaccggacaaaggcgctcgcgctgctcgtcaacggggcgatcgccttcggcctgaatgtcgtcagctttacggctaataagaagacgagcgcgctcacgatgagtaagtcttttcttgcgctgcgtgtgctgaagcatcggctgatccctcgtcttgctttcatcggcagccgttgctgccaatgtcaagcaggtgatgacgatcgttctcgccgtcctcgtcttcaacctaacaatcaccgtgggttcctctctgcctcgcttcgcccttcgaatgcgagacggctgatggtctctcactgaaacaccttcagccgaccaacggcctcggcatcctgctgacgctcctcggcggcgcgtcgtacgcctacatcggctacatcgagaagcgtcagcaggtctgacgatgcccgcaaccgccgcctctggaatctctttctgcgcaacgcccttccttcctcctcgatcggacctctagaaccatcagccctccatactgtagccataccactcctccctctagttccctcggcagccctgcctgcagcgctcacgatgcgcgacccctcatcgacggcaggctgagggcttcgagcctcgcctgtggtcgagcaacccttctctctgacctatgcacgcctcttcacacacgcagcccgaggggctgacagctaaccgtttcgctgggcaggccgtccctaccgagtggctgaccgattcgcaggcgctcgccggtcgacgtcggcgcgcatacacccccggccccttttcgcgtctgacgaccaccgacccccacgccctccaccagtcatgcccttctccgccagtccttcacgacccaagacgcctctctctcggcctgggacttcggcctccaagtcggtctcgggcgagacgtcctcgggcgccgccagcgacggccacgtcgtcgccctgatcgaaggcaacgcgatcggccgcgaggtcggcatcgcaacctactcgccgacgactggccgggtgacgctcagccagctggccgactcgctctcgtttgcccggtcgctccaccacgtcggatgccatccgcccgactggctgctcgtcaccgactcggcgttcccctcggccgtcgagggcggggcgtctgtgccgcgcagtaggagctggcccggcgcgagggccaaggcttcgaagcgggagccgacgatgctcgttcgcgccgtcatggacgcctggcaaggtgcagaggtcgtgccggtcgcccgcaagtattggacggacgaggctggtgagctccagccctgctctctagcagtggcagctctcggatctaaatcgaccgaccctcctttgctccaccccatgcgttcctcctctcgcaggcaagagtttcctcgcccagctcgccgtcgacgtgagatgctccgctacgagaggcgaatgcgacaaacgactgacgtccaccctcttgtggcttcaggatgaggaccggcccgcccttctggtggccaccgagcagaagtgatcccgacctcgcgcttcacgctgccacaggtactgatcgcaggctgctgacgctcgtactagatacctcgccctctgtgccgtcgccgctctcttcaagtatctcgccgcctcgcactcgctcgtctttgcgccggcgtcactcaagattcactgggatccactcgagggtacaatgttgtgcgccgtcccgccgccgagtcgtgcctcaggcgcatatacctctgctgacacggctgacgatcgccgagcagcatcgacgctgacacggccaagaacctcgagatcgtccacaaccgggtcaacattaagtcgaaccagtcgctgtttggtgaggcttcctctctggcatagctgctcgcgcgcactactgatcatggcggctcctaggcgtcctcaaccgcacgcacacgccgatggcaactcgcttgttgtggtccaaccttcttcagccaacccgggtccagagcacgctcgagggtcggctggacgcggtcgacggtacgtctcgagtcactcatcagcccaatttgatcgccgctgacactcgatgcctcagagctcatcgccaacgaggatcgcttcgagcggatccgaaacgctctgcggccgctctccaaagtacgacttccgccagttacgagtggaatagtagagctgacggtagccgctcttgcagatcgacatcgacaagctcatcgcccatgtgcgagaggccttctcactgcgcatctcccctgtggcttccgactcattcgccatccctcttctgcagctcacccagcaggatgccgagacggacgtcagccgcgccgagcggcgtgtgacgcaaatgctctcgatgcgtcaggtcgtccgctctctcattgccgtctgctcggccgtcgatggcgtccagagcgagctgctctccaagatccacgtaatcctgacggacgagcggctcgagatcattgacgaggtcagtccagcctctgcctcgtcataggcgcccacgcactgactgataactcgcttctgattcttacagctgatcgccgaccggctcgaggaggacaccggccagcccgaccgcaagaagacgggcctcgcccagcgcaacgccaagatctgggcggtcaaggcgagccactcgcgcctgctcgacgtcgcgcgcgagacttacaaggagaacatccaggacattatcgagctcgtccaaggctaccagagtgcgtcagcgtgcagctcagagatgcgcttctgccctccaaccacgctgagaacgcttcttgattgactcagccgtccatcacttgccgagcctctcagtcacgttcggccagaacctgacgatgatcgtcaacgaggacgacatcgacgaggacggcctgcccgacgtctttaagaacgtctcgaaaaagggcccgaaaaagaacgtccctgcaggcatgcgaccgagcttaaatgctgacgattaactgcctcgcttgcaggttctcgtgcacgacactcgagctcaaaaagcgccagcagcgctacaacgactcgctcgccgagatcttcctcctctccgaccagtgcgtcagcagacacgcctcgtcagacatgatggagttcgctgataccgggtatcatctcgcagaatcattcaacagctggttgccgacgttctccaaggtgtcagtgcgctctacaaagcctccgaggcagtaagttgggtctgcggcagacctttgattctgacgcccgctgatcaccgccttccgccacagattgcgatgctcgacctgctctggagccatgcgcacacagccagccttatgaactacacccggccagagttcaccaagacgctcgccatcaagggcggcaagcacccgtgcggccgtcttagcctcctgtctcttgcctgaccgcgaccgcttgctgacagggcgtcatcctcgcaggattctcgacaagttcaacgacggcaagccggtcgtcgccaacgacgtctacgcctcgcacgacacatcgtccttccagatcgtccagggcccgaagtgagcttcttgactatccgcctcgactggcttgaggctgactttccctcccccttgacgaccagcatgagcggcaagacgacatatcttacgacgatcgccctcatctcagtccaggcgatgatcggcagctttgtgccggccgagtacgcaagcgtgccgctccacgacgcgcttctcacccggctctcgaacgacgacaacctgaccgggtgcgtcgcgatgcgtgtggcggcagttcgacacaggctgaccctcctttcgcttccgtctcttgaaggtcgctgagtacgtttgcggccgagatgcgggcgacggccggcatcctctcgctagcgacggccgacagtctcgtcgtcattgacgagctcggccgtggcacgtcgccgctcgaagggacggccatcgcccatgccatcgccgaggagcttattcgctccaaggcggcctgcttctttgcgacccacttttttgagctcgcgacgacgctctcgggctacgaatcggtcgtcaacctccatcttcaggtcgaggcgagccgcaagggcgccgttcgttacaactaccacatcgtcgacggcgtgcccgaggaatcgcactatggccttcagctcgccgaagtcgccggtcttccggccgacgtgctcgccgtcgcgcaaggtcagtctcggcgagcgtggacttgacctggcagaattcgtcgctgacccctatcccgccccgcgtcagacgtctccggcacgctcacccggctcgagcgcgagggcaaacgtgcaagcaagtcaaacaaggcgacccagcggcgcaaggtcctgctttcggtccgcgagaagcttcagcacgcgcttcacagcgatctcgaggaggagccgctgcgcgagtatctggcggcgatccaggccgatgcggttcgcgacctcagcgtggccggactatgaaggttggttgcagggagacaaaaaacgtcattctatgcgatgcgacgatcgcgactaggctacagggtgcgagtacagggaagagggcggtacagtgcgaagatcatgcggaagaagagagatacgagatccaggtgagggagacgggtagggcagcggcgagctgtctactcgtcgagcctcggccgcttggcgtcggcctcgctgccaggcgacacgctcaagctcggactcggccgcttgcgcgagtcgtcgagccctgtcagaccaaactgccccgacgctccgccgtcagtgtcgtcgttcgaagccgagctgctaccgccgccgccgccgtcgtcagccggccctccgtcgaccgtcggcgagtccgtgaaaggcacgttgggcatgatccccagatgattgagcggctgctggaggcttggatggccgacttgtgacgagggccaggcaaagcccgaaggaagggtcgcagcgcgctgaggcagccctgactgctgttgttgctgaggcggcgcggtctgatcgggcaggccgttcgagaactgctgctggggctgctgcatctgctgctgctgctgctgctggacgttttggttgacgagcgagttgaagagcggatggttatacatcgcgtgctgctgatgctgtggctgcgcctgttgcgggttgaagccgttctggccgccgccttggagaaagccgaacaaggggttgctgagcaggcttagcatgtcggctccgcctgcgagcgggttgaggccgagcgccatgccgccggcaccgtagagcccgcggtcctggaggaacgagaggccagcgttgcccgctgggtcgacgccgccgttgttgagggcgccgtacgaaaggccgccagccgagccgtacggcataccaggctgctgttgcggctgctgctggccaccgttcgggtcaaggttcgaaaagttgcggaacatgggcgaaaagttgaagccgccgccagcctgtgcctgccgagcacggtaaggtcagtcacttcgaagttgagtcgcatgcgaggaggtaaggacgcactgtcgatccgtagccgttggaagctatgtcgagtctgagaccatttgcctgcacctcgctcgccgcccggccttgcggatcccagctggccgaggttccgccagcacccggaccgatgctctgcgcgtacgcgccaggaagcggcgctgcttgttgctgctgagcctgctgccagcgggctgtctggtagtagccaagcccgttgctgctgctgccgccgggcgtctggatggacgagttgaaatgcgagatcgggggctgcgtcgtcggctgttgctgctgctgctgctgctgctgctgagcggttgacgatgccggctgctgtggcgttgtcgaattcgaagccgctccgccggcgcctttcgaccggctgcgagtcgcagcagtcgacaagcctgcgccgccgccgttcgtcaagttgacactcggcaggttcggcacaagctgcggcggctcgactttaagaggcccgaccggcaggcctgcccgcttggctgcaaggttcgacgcgatctgcttgcccttggccgccgacttgccctttaccgggccggtctcggagcccgactcgtcctcgtccgacgccgtcggcggctcctcgcctgcgtccttagcagccgccgccgcgagctcgaatgctggcttcttctcgatcgttccagcgtactcggtataacggatcaggatgtcgtccatgctcgccgacgagaactcaaacgccttgccgttctcgccgaagatgatgacggcgacctgcagggcgagcgaatgtcagatgtgggatcgaaggaaatggggagaagaagggccgcacatcggctgagcagagtacgctgagctcccaggccttcttgatgaggccagccttgcgcttgagaaactggagtgcgaggtgcggagagtcagcggacaaacttctttgtcgattgagcggctttgcacggcatatcatgagtcaggacgcacagttacagactgaggatgatgaacaaaaaggggttcgaggttagctgcgagcggctggatgagggaggactcctagggctgcgtgagtcagagacggaccttgttgcgcgactctggaatttgcttgatttggcttcaggagagcgaggttgagagagtcagcaaggcctgcagggtcaactgagcagcagccgaggtcgagcgtcggcctgcagaggtctccctcctcggcttcagccgaagtggcctcttggcagcgcccgccttctcactgacaaaagacgaaaggacgcacatcttcttgcggcccatggtgtcaagtcaagagcaagggacgctcgagcggaggttccgatcggaggttggaggattgtaagagcgaggtctggggccgcttgtgtggtcgctggagaggcgggcgagctggcgcacgaggagaagccgggcggcgagaggctgccgcggacgatgccacggcacgtcggccgagcgagaagagtgcgcagacgggaacggatcggacgagcagcgagcaggaggacgagtccgccgagcggcgaggcatgcgatggagggaggaagaggaggcgacgtcagtttgggagctcgggcatgctcggccgcaagccgcagggctgaccaggtcggagaggatcgctcgcagacggaccttgggtagatggcagtcggtcgcgatagaccgaaggagaaacgaaggacgacggacggccggcgagcgggtgacagcctcttgatgcgagggagcaggaggacgaggcgggcttgccgagcgaagacgggctgctgccgaggtttcggcacgaacggacggtagcgggcgagccgaccgctgctggagtgaggcctcgagcgagcacgaccctcaggtggatgctcgaggttggccttgcaggaggagaataggagctgtgcgatggagattcgcgctacgaggacgcgtttcgggttagggcaagtgaggggatcgagggatgaaggcaaggaaggacgaggttaggtcggcccgcgtccccttcaggaacggcccgccagaaatagacgacttcaaaaaaagaggactcagctaggcccgcagcccgacgtgcatttgcgtcaggcaggaggtcgtgcgtgtgtgcgagcagccgacctgctacgcgtcgagacgtgcacgacgtgcacagagtcagacttgacagggcaggtcaaacatccagcggagggcctgtcgaccgcctgtcactcctccttgtcgcggtcacgtcgccgctctcgacgacgtctgcgtgttgtgcaccaatgccatgcatgcagtgagaacgaaacaggggcgagcggcccaacgggtccgtctagatatgggcggccagccagtgtggcagctctacgatgatgtctgcgggccgattcacctcgtcgcccgcccttttctttggaatcctccatctcgcgacgctcacgccttctcctcgccctcgagccaggcccggacgctgacggcaccctcgcggtcggcgacaacctcaaagtagaccttccggtcgtccttgacctcgatcgagacggccttgaggaatgtcgtcttctcgacgacgacggtcgagacctcctcgggctcgtcgtcctcgtcgtcgtcgtcgtccgagtcgagctcggacgccgaccgcggcgggggggtgaccgtctcagtcttgattgacgacgtgccctcccagaactcggcaccgaccgtcgtcacgccctttgcgacggggagcgcgagaagccgccgggcaggaagcggcgtatcggccgggataacagtgtggaagtcggcctcgaggcccgggatgacgagcccgatcggcttggccgtcgaggcgacgtcggtcgtcggcgtcgcgaggagcgtctcgagcgggagggcgccggtcgacgccgtcgggagctcggcgaggtggagcgcctggagcgcgcagccgatcgcaatcgcctggctcgggtcgagcacggacgagacgggggttccctcggggaacgtcagctcgatcgccgaggccaggcccgggaggagcgaggacgagccggcgaggagaacctcatcgacttcgacgacgttgagcccgcacgactcgacgacgcgccggacctcggccgcaatcttgcggtagacgccgccggcgaggccgtcgaaccggagccggttgatcgaggccgagaggtcgaggccgtccttgagggcgtcgaccgcgcacgtcgcagcgcccgacgaggcagagagcgaccgcttcgtgtgctcgatcgcaagcaggagcttggtctgcgcccggatgtcggccgccgacgtctcctttgccagcgggtcaaccggaagcgccagcgaaaccttggtcttcttcgtgaattccttggcaaagtgcgagatgagctggaggcgatgaagcgagagcgtcagtgagaggtgccatctgcgactcagaggcacactgcagtactcacaaccttgttgagctcgcggccaccgacagtctcgtcccggcctccaccgaggtgaacgtactcgccgttgcggacggcgacaacctcgacctcgacaccggtctctccgacgtcgacgacggcgacaaccttgtcaatcttctcaccaccctcgggctcgagaccacgctcggcccgggcctcgggcaggcccgcccggtagccgacgaggacggcagccgactcgtcgatgatctggagcaccttgaagccggcggcctcggcagcggcccggagtgcctcgcgctggggcgccttgaacgacgatggtgcggcaatgacgcagccgtccgaaggaggcgcgccgaggaagtcggtcgccgactggtgaagcgtcttgaggaagagcgtcgtcacctcgggcacggtcaggacgaggtccttggcaaccggctcggaagcgggcgtctggaggcccgaggcagccggcgtgttcttgccagacttcttgccgacggacggggcaggaggggcgacgagcgtctcgaccttgtagccggggacggcgtcggccgtcgagatgacgggggccgacggcgtcagggaaggaggaacaccggcaaggtcgtcgaacctaatgcgagagcgaagggcagttcagcgggagtcgtcctgcatccgtcagagacgccgagacgtacttgtggccgagcaggttgcggaagccagtgatggtgttctgggcgttcttgacaagctggccggtggcgccgttaccgatgtactgaggacgtggcggagaagacaggcggtcagtcggccggcaagcaagacgcagtcgagcggagctgccgtgctccagagccagggctaactcacgatctggtcaccgttgtacgaaatggcacaggcgatctgacgctcgccctcctcgttggcgatgcagtcggcgtggccctcctctgcatggacgaaagcggcggtggtcagaaactcttgctgctccgaccgcgcacatcctagcgggcgtccccctgcgccgctggcaggctcaaatcaagcggcagacgcactgctgatgacactgatcgaggcgtagctcgatccaaagtttacaccgacgatcgaaggcgacatggcggaagggaaaggggtctgcggagggagaagaggagcccggctgtcagggcgaggtctcgagatggctttgcacgggcgcgggagtgccgcctctcgctcggcacgaccgccgacggcagagtgcgagtccgagtgcactcgcgtctggcagagagggccactcacaagaagaagggggaagagagaagaggcgacgggggtgtatggggtcgaggacgaggtcgacggtgctgctggcttcagctggaaatccaaggcgcccttttctttttttcccgcccgcgcccgtccaggccgcccctttcgacgctccgacgctcgagcaggacagggcttgacaggctggtcgcctcctccaggatcaagtcatgagaaggaggatccgagactgggatgagagcatttgcgacgctctggctgtcgtccgactgcctagctttgctgatcgtcaacgacctgggtgcaatctgctgccgttcggcgctggccggtcagcctaaatcgcgtcggccagcatgggtccgtcttcgacgcccacgctcgccttctcgtcgttaaccatcacgtctgacagacccctcgccccgtcatggtccttcttgccgcctcggccctcctgctcggcttgccactcgcagccgctcttcctactcagcagccctttgcatcaccgccgaccgcggccgaggccgccaacgatgaccgcctcgcctcgcacaccggcggcaacaagtatctgacggccgagatccgatcctttatcgactcgctcctcgccgagtgggactcgcccggtctgagcgtcgccgttgtccggcgcgaccctgaggctgccggcggttggacgatggaggcggaggggtacggcatcgccggtgccgacggccggccgatgacgggcgacagcctgtcagcgatagcctccaactcgaagctcttcacggccatctcggccggcctgctggttcagaacgagacgctcggcgaggcgtatcgcgagaagaccggccggacgctgtcgtaccggtcgaagttgcaggatctcctcccagaaggcctctggaagctgcacgacgcggtcgcgaccgagcaggccgacctcgtggacctgctggtgcgtgctcatgtcctaaccacttaccacggtcaaacctttcctgacactgcactccccagtcgcaccggacaggcctcccacggcacgacatttcgggccagccccggaagggcggcgtgccagagatggtccgtcctctgctcgtcctcgacagcctttctcccgggcgctgacgacttctgaatctcagatctccactttgcgctaccttcggccgtcaaccggtttcaggcaaggttaccagtacaacaacctgatgtacgagacgttgaccgagctgccgcacgtcctgctcaacgtgacgtgggaggcctacgtccaggtgcgttcgtcgatcgctcggcccatctagacgacgctgagactgtcccttcgccgaccaaggagcacctctttgacgcgctctcaatgaacagcacgaccctctcggttgccaaggcccaggcgttgcctcacgggcagatgagcgagggcttcctccgctcgggccggaacgtccagctcggcctggagggcgtccggaccgcgatcaagccgttcttcattcctgaaggggaggaggaaatctggcgcggggctggaggtgtgctgacgagcgcgcgggacctcgtgcgccctcttctccttctgcctcgaggatacgtgctgacccctagcgtccggcacgcgcagactatgtggctggccatgcttctcggcaacggcaagcacccccatacgaatgagactgtcgtcccagaggccgtcatttcgcgatgcgcgacgggcgtgtccatggccgatggcaagccgtgcgtcggccgtcaaccgggcgatgcacctgctcggggcgttatggctgacgtgagctcaaccccggttcgtcgacagtaagtggcccgagttctcgatcaagggctacgggatgggccaggagatgtacacgtaccagggcaagcaggtttgtcctcatctggctgaagagaacagagggaccgccaactgacttggttgcttcgcctgcaggtcgtcgagcacggcggcagcaacatcggcttcaaaagctgggttggccgcttcccaaacgacaacctcggcatcgctgtcctctcggccgacgaggagtttggtacggccctcgccgacatcgtcaagtggcacctggccgagacgatccttaatctgccgctcaaggtcgactggaatggccggtcgcacaagcaggtcgaagactcgcgttcgaaggacctcccgacggcatacccttcgcatccccaaccgccgtcgagcccgtcgcccttcggagtgtcgtttgagggcaagccgtacgcgcacccgacgtacggcgcccttcgcttttgtccgaccgaaccgccgttcaagacggccttctgcaccgacctgctcggtcgcgactcgatccggccgtttctcaacacgtcgctcgacgcccggccgggtccaaaggcgctcattgcgcccttcgacggcttcttcacccagttcctccggctcgcacactttgacggcccgctcttcaatatcacccagatcttcagcaacggccagggcgcctactccctcgagacggacggcctcgcagagtgggtcgccgacgagcctcacggctgggcgttccgcggcggcttctgggggaaggggtctgacgaggtcgcgccctcgcttgaaagcctcggcctcaccggccgcgacgccgccgaggtctggttcgaggaggcctgaggcgccgatgccgatgaacatgcgtcaaaagtcgtcaagataagtccttacgcgagcgaggtcggcacctcggtgcgcatagcaagggggtggtcgtcgtcgttgagagggggcatccttcgtgcccccattttggctccttcgccgagcctcgatcggccttccgtgcagatcgctccgtcgtccgtagcgtcctctactggcacggcagttgccgcccttgaaatgcaggccgactgccccgctctctcgttacgcggcacccgagctgcatctggtgcctgccggccacgctcgtcggtcccacgctgagcgatcagccgcctgcccgtccttctgaggagtctgctgaagccttcctactcgctccggtcggcgaggtgcatgagcaggttgttgaggcagcgcttggtcgccatgtcgccctggcagatcaaggcaagtcagcgacggccctcacgccagagaaagagaagatgggaggacggaccttaagcagggccgaaaacgtctgatcacgcagcggttccggaagacaggcgcggagggcctcgcgggctctgagagacgcgcagaatgcgggtcagcgacaagcgccgtcgcagttcctcctggcggggtccaactgacctcgggttgtcgctcagacggaggtagcacctcacgacgtgcttcagcagcctcaccgcctggctctcgacgagctggccgaccatgttgctcagaaccgtcccgaccgcataaaagcgctcgtacgtctggcagatgtaggccaggccgaggtcgtcgagcagaatcttctggacgatgaagatggcgaccgtcttggagagctcggacccggtctccatgatgcgcaggcagaggggaatgatctcggtcgagaggagaaagttgatgaccgacgagttgtcattttgctgcggtggccagcgggcagagcgcagagtcaggcctgagcgttggacgagccaacatcggtgagagcgcaccttgacgagcgcgccaatgaccccgaggctcgtcagccggagatactcgaacggcctcgtctttgacgtcgtgttaaggaacgggtagaggaagagcgggatgtgggcgttgaggaaaagggagcgcgtgtccgagtggcttgcgacgcattggaggagggcgagggcgttgcagacccggttcgaggcgtgggccgagagggtcgacggcaggaggaacggatagacctgggtgatctcttgaaggagggccgacatgacgcctggcgaggtaaggtgatcgcgcgaccggtcagcctgacgattcccggcggcaccaaccggatcaaagcccgatttagcgcgaggagacggggcgcaccaaatgagtgccagaggacgagcgcgaggtcgtcgtagagctcgcgcttcttgctgagctcctggagcgcgccctcgcgcgtgccgctgtcgagcaggtcgccaatgaggcccatgatctcgccctcgtcgcttcccgagttggacgagagcaggaagagcttgtgctggccctgaccttgaccgccgctgttggacccgccaccgccgggctgctggggttggggcgtcgacgacgtcggaggagcgagaggcatcgatgacggcccgccgctgctgccgccgccgccgttcgccggcgaggacgacgacggcgggttgaggatcgacgtcggtaggagattctgcgggtgctgaagctgctgctgttgttggtgctgctggtgctggtgctggtgctgatgattctggtaggcctgctggtgggcgtgctgctgctgctgctgctgctgctgaggctgctggtgatggaggtgcgacgacatcatcctcgcgcggcggccggggagagtgttgaatagctagtcggttgtgatcgtggccatcgacgagtggtagcgtgcgcgcaggtagggtagcaggcaagcgacgctggagacgtgtgtcggtccgagatgcgaaggaggaggaggaggagctgaggccggagggagaagcggccgtcgctcgtcgtcgaggtcggcagcacgagcaacgcccaaacgacagcccatcggggccatcgggggttcgaagctgaaacgctcgctcgatacagctcgctgctttccgccgtcgaccacatcgctcatactggacccgtctgtctgacaggctagcacgggcgaatcgagctgaatgcggaccaggacggaccggtctgccttgattaagacctctcgacggctgaccgcaaggggacacatgactggtctgcgcgagagacctcccgagcgaccctggcacaggcaccaggcgccaggcatcaaccttggagaggccctctggtatgcgtgccctgattaggtgaagttcgacgatatacaggtgcaacggacaaagatcacgcacgacgggcggtctcttgcgctctcgcactgcgcccgcccgatcagcaaccactccagttgtcgttgccccgcagcagaccccggattgccattgtcaacagggcgaccgtcgctagcgacatgtccttgagcgaactgagggctttctgtcggcgcgagcgccgtcccttcgcgcaagtggcggtcgccgaagacgcatagcgcgcgacccctttctctagcaccgcgcggccgctgtctggcctatgccgtgccttcgcctcgcactcgagttgtcgtcgcttgccatctctcaccaccacctaccaccgagctcgaccgcaatgaacataacgcacccggactgcgtctgtagtccacgcaagggatctgacaccagcctcagcctcgacgacttccttgacgacgtcagtccctcacctcccctttcattatgccgagcaagccgtcgacgcgtcgtcccagctcgcttggctcggagtatgcacctggaatacgagcgtcaagacgaaactgactgaccttgactatcctccctcggcctgacagctccagccgttccctgtcgtccaggaggacgggagcgaggtgcgccgcgtcgcttcatctcgcccgtgctgcgcccctatcattcgactcgtcgagctggctcctgtcgcgtccctactacgccctctcgcgacccagcaactgactcgcctctatcgctcccccgaccagtggctctgcgtcacgcgtaaccggtcgttcctgacaaaggacagcgagctcctgtttgagcacaaggtagcggtcgcaactggccgcgaggtccgtgcgtcccctcttctactcgctcggcagccacagctctgggacgtcctgcgcgtaactcactccagacctagcctcgcagtcaagaacctcaacgaccgcctgcacgaggtctcgacccgggccgaggcggccgagtaccacgcgcttgcgcgcaacaacctgattgcgctgatgaagagccattcgcacgccgccggctacctaaagttcaagcgcaaggccggcaagcagagcggcgcgggcaaggtccgggtcgatggctggcaggtcaaccagtgcgtcgccttccttgctagccctgtcccgttggatgcaggacgcctggctgacggccaatttccgcccttgacctctagcatctggcacacgctcgcccactcgctcatcgacgacgacggcgccctccaccagacgccggccaagatggtctgcgtctcgctctctcccgagggctccgggcccgagcacgttcacgagttccggatctacgtctccaacatctggtgggagaagtcggctaaggcggtcgtcgccgccctcgtcaccgacctcaacattgcaaaggtcgagggttggtcggtcctttacgacgagctcggcgtcggcgaggacgatggcaagtcaaagctcccgaagaaggacttccgctttccggctgccgtctgggtgcaggacaagctctttgacgaggacgagatggcggtgcgtccctccgcgtgcatctgttccaaacgaagcggatcctgacgtcccgcgctcctctcctgtggcaggacctaaaagcgcaggactcggacagcgtcaaagcccgcaagtacggcaccgtcgtcgcaaaggtcggcacgtcgcagagcaagacgtagtcgtccgatgcgagcagcagcggccggtgcgtacaactctactgacggcctatctcgtagacggctgaccttgcgcgtcttgttgcaggccgcgcaagcgcaaggggacgcccgagtcggaggacgacgagtcggaggacgacgagccggaggaggaagatgaggaggaggacgagctccagtcagcgccggccaagtcgagcaagaagaagccaaggacgacgcaagcatcctcctctcggcggtcaccctcgacctcaccggcaccgacgccgcgcaagacggtcaagggcacgggcggctcggtcctcctctcgtcctcggcggcagccgcggtcgcgcgggcgacgccagttaagcgcatccatcaagggcggccggaagagcgggaaggtcgtcgtcaacgatctgtcggacgatgacgagatggacgacgtgcggccgacagcggggtcagcatcggccaagaagtcagcggcggtcgagtaagagtcggaggacgacgacggcggagatgttgtcgacgagactggagttggtctgcagaacgacggcagtggcggcgacgtcgggcctgacgaggtcgtcctagcgacgttggacgagccagccgttcccgccgagggcggggcgaagagctgctcccgagctgggccagttgagcatcagtggcgacgccaaaccactcaagagttcaggacccctgatgtacctatgcccctaatcttcctttgtccctttgtccgcccattcgaagctcgcacgaagaggaggtcaggccatgcgcattgctcactcggtcggctcatagccgcccgcggtccccttctcccactggcgcgggcggatgcccatcgtcccgaggtagcgctcgaggtcaccccgcactcgccagccgacccagccctcggggttgtcgaggccaaacttgtcctcgacggcttcccaggcagagcgaacgatgagcgggtggccggacgagcaatggtggagcgcccgtaggaggtggaggacccgccggcttgaaggcgcctcttcggtgagccgcgtccggacgggcggctgaggcgggaggtaagagggcataattcgcggccgcgtaccatctgattgaggagcaagggcggcaggtcgtcagtagagcggtctggaacgggtccactagcctcaaggacgcacaagacgagccgggcttgaggttgaggaagctccggaagaggatgatgagcgtctggagcgtccagcgcttgttctcggtcgccgcgttgaccgcgtactggttggcggccggcatctcgcccgaaaagcccggaacgtaagggtcctccatctcctcggcctcggcgcccatgccggcctgccacgtcttccaaaggtctgcgaaagggagggtggacgcccggtcaggtcagcagggcagctgccgaacggatgcccggtgtaggagggacgcacgctctcgtgtgctgaggtcctggtaagcctcgccgacatcggcaccgccagcgcgctgataggccgtcggatgggccttccagtagtcgcgagcctcgtcgctgacgacgtggacctcggcaaactggacaaagccggcaaagaactgcgtgtagtcttcgatgaccggccggtagacggcgagctcctttggcggcctgccggcccgaccgggggcggagcctggcaggcggagcgacatgccgttcggctcaatcatgtcgcggaagactgagagcgcgagcgtcaggtcgccgcggaagatggccgcccggaggagcgtcgtgtacgtcttgcggtccggtgcagcgtccgacgggaagtcgtagttcatcgaatcctgcgcgagagagaagaagagaggtcaatgtcagagatgcagagagggagaggcgcggcaggccgggcgacgcacaaggatcgggttggcaaacgagacgagcgcgtcgtcaaagttgtgatacatgccctgggcagcccgagcaatgtacgatcgccgccagggcaagccggccgcgtgtcggcggaaggcgacgtaggcctcgaacgggatgttgaggtggatgttggggtccgaagtgaaagcgaagagaatctcgttgatcgcccgggtcgaaagctcaagctcggggtccttgagaatgtcgggcaagtggaacggcacggtcgagtacgaccggtggaggtgcgagaagatcgccggcaggtgggccgacgacgacagtggcgactgggcgatcaggtgcgagaaggtctgggccgtatgcggcaggcgaagcagcgagtcaaacgcttgcctcgatggcttcatcgtcggtgccggcatcggcgtgtgaggcgacctgaagggcgtctcggcctcctcgggcgcgagctcttcccctgcgaacgccaggccggccgccgcgtcggacaaggactgagctgcgacgagctcctcttgacgcttgagagcggctagcttgtcgaccgcctcatccttaaagagcacgtcccacgaggcagtgaagcgctcggcttcggccttgctgcgctcccgcaaacggtcgacactcagtcgttcctccggcccgttgaacgtttggacctgcgacttgcggccgagcgccgaccggaggagcttgttgacgacccgctgaggaacctcgaccccgtcagccttcatccggcggacgacagcgtcgagtcgcttgtagccgtcgaggttggtcggcccgttgcaaagtgcgtgcgcgacctgctggtggacgtggtcggtcaggagggccgaggggatgtcgaggtactgctggatgatgagcgggtgctgccgccaattggagagcggcaggatgccctgcaggtacgacagcttctgtagctcggccttgctcggtcgcggtgggagctcaagcacggccggcgcagggaacatcgaggcgattgagccaaagagggtgaagggctcagacgacgacgtggccgagagcgaggcgcccgtcggcaggaagggcacgaggaacgacggcaggcccgtcaagggtacgctcggcccgccctcacccttctggctcggctgcggtgctggccagccaaggtcggcagagggctcctgggcggaggcctcggtcgcgccagctgcatcctggccgctcgcctgagcaccgaacgacgcccgaggagcctcctcgacagcgcctggtgcccgcctcggcagcggaggaggcctcatgcgcgaagacggcccggcagatgccgacggggccgaagggggcgatggtggtggcagcaccggccgttggctcgagccctggccgggcgggcgtggagggcgagctgcagtggaggcggttgcgcatcgggccggttgattgctgagggagcgactcgagggcgtgaggcgcttcatgtcgggcagttgtgaaagggattatcgagaaggaatggcggtggaggtcagggtcgaggaggagggccctgtcatgcgattggatggccggcccgaccgagcgactcgctcgcctcacgcgcggggctgacaggcggagacccctttgaagtccctcactcgagcatgctgcgttcgtcttttgctctctctcgcgctcagcaaggtcatcagggtcatccaagaaagagggtcgcgtcagatgagtctcagagatcgacggtctgcttcttcttcttcttggtcttggccatcggcgcggcctcgccggcggtggcatcccctcctgcagtactggcgacgggctgcgagtagatcgcaggcgctcggtcagtcgaatccaaaggactgccgcgaagcgcaaagaaacgtaccgtcgaggcgccgtctgatcgcggcttcttcttcttcttaaggacccggacgacctcgaccccttcggcctcggctgcgggcagcgtaaactctggcgtctcggcgcgtggagtggccgagggtgttgaagacggcgccagtgcttcgacgtcgccttcgtcgtactcgacgaagcggccctttggccgagccgataacgagggattggtcgtttggcgtgctgatggggatgaacggcctccgccgccgagattgagcttgatgtcggccagtcgcgggacgtcgtcagatttgcccaccggagggtcgggcgccgaggacgtcgggccgacgacagcgccatcaggcatctcgccatcgaggtcgatcaccggcggcggcccggccactctggccttctttttcttgcttttgcgctgtacgtccggcgtctcgccatcggctgtgggagacaggccgaggtcgagcttaacgaccgggatggccgacaggtcctccgattcgcgccggccgtcttggatgtagtgcgggtcggccttctgctttgccaggcgtgcggctttgcgctgcatgaccaaaatcgagctcaatgtcagccctagtcccgccccaatccggtaggtagcgcaccttcttccgctcctcagggtcctcgtcgtcgcgcgccttgcccttgcctttgggcctcttgagtcgcccaccactggccgcgacgacccgcagaagctcttcctcttccttggaccggacgcggccgcccgaattcgactcgggccgcagcacgtcgcgacggacgggcgcgagaagcggctcgtcgtcgctcacttcgctctcgccggccgcctctgctgcacgctcagcgccgaagtcaaagagcggccggccgagatcgagtccctctgggacggcgatcgagccctgagcgcgcgtcgacacgggcgggagcgggtgcgaggtgaagagtggtgcgagcagcagcagtgacttggggtatgatggcccggccggtgtgacggcttggtcggccggcgttggttgagcgtcggcctcgtccgctggcggcgtcggcaccgccgccggccggctaggtttgtagtgatcgagatcggccttgacaaaggcaaagaggttgccgacctcggccgcgcgctccttgacctcggtctggctggacgcgaggaacgggctgagaccggcgacgagcttctcgagcacccgaccgacctcgaccacatcgcccgactcaacactcgcgtcccatgccgccgccttctgtgccgcccagaaggcaaacaccttcgccgcgccatggacgcaggcggcctggacgccgggcgcgagtcgggcgacatcggcctcgagcagcagcatcgccgtctggggcgccgagggcaagaactcggcgtactcgccacagacccaggcagcggcagcgaggacctcgccccacgagcgctcgccgccttctgcctgtacgccctcccagccgttggcggcactctcgaggaagttggcgtcccgccagactttgccaagaagctcgacagcgctcggccggacgtcacggacgcgaccgacaatttcgacgatctgcgcccggatttcgcggccgacatcaacgcgcgcgatgtaagcgaggtcgatcagaacagacaggtaccagacaaagttgggcacggcggcaaaggtgtcggccgagccgatggcgaggatcgtctgcgtgaccgtcagccggtaggacggcgagaggaggctcgtctgcgacgaaggtcgggccgacgacgccatggtcgaatcgccagtgagcgacagcaaggaggccgccgcatcgggcagcgcggcctcagcgtccacgggtggcgaggcgaggagtgagaggaggtggtcgatgatgctctgggcgttgtcccggttggcctgagatacgagagcaaacttgtcagcgataagcgcggaaggaggtgagatgccattcgagcgcaccatggccttcaagagctccagcgtccgcagtcggatcgagagatcagggtcgtcgacgctcgcgaggatgacgtcctgatagtcctcgatcaggtgagggtgggttgggacgatgtagacgagcgcgaggagggcgatgtacttgactggcggggcgcgttgaagcgtcagcgcaaagcccgatgacggagatatgggcgcggctaggactcacggttcatgtccttctcgccgagaaatccgccgagcttgcccacacagacccgggcgagcgcctcgcccgcctcgtcatcgccgagcatgccgccgacgaggcacgtccgcacgcactcgtagagaagcgagatggccgaggttgtcgtgatgagcgacgtcagcggcggtaggagcttcttgatcagccgcggctcgtgcggtgtcaagagggcgaactgccaagatgtacatcggttagctctggacgtcaacgctgggcacctgggtgaaacgtaccagcttgacgaccttgatcagcatccagttgttctgagacgtcgagaggatctcaaagagcgtcggggcgaggggcaggtagttgacggcattcttgcccgcaagctcggtcaggacgttgactgtggccgagacgacgcctgcggtgaaaggtggtgaagccgagtcagggctggcaccgggtggtgatggaggggtatcggcgcaccttggtcgtcgtcgagcaagcgctccctcagtcggccaacgttgtcgacgagcgcctctgggtacttttcaaagacgcggtagaggcagagcacagcgcgcttgcgcacggcaggcttcgagtgggtaaggagcgacgagatgtcgtgcgtgaggtcctgcgcgagctgcgtgttgagcagcgcaggcagcgtcgagagcgcgagggcaacgggcggcgcgtccggcgacatgaggtcctgcgggagcgagagtgagtacctcccacagttcgtctgatcgcagtctgcactaggcgcaccttcttcaggccgttcacggtgaggacgacctcctccgtcccctcgggaaaggccgattcggcggcaaggtagccgacctccttcaagtggtattttggcgagctcatgacctcgacgacgtggaaggcaaagctcggaggtgccgagaccgggtagagcatcatcagctgaagagccgaggtcgagacgatcacaagggggaagggtagaaggagagtcagctcgaagctcgtgccgcaggcctggccgtcacgcacgtagaccatcttgagcacggccttggccttgaggtccatgtccttgcctctgagctcggaccggatctcgtcaattgcatgcgtgaggaagtcgtcaaactcgtgctgcgaccggtgctggttggcccggatgccctaggagggagcaagaggggaagggtgtagccctggtcagcctcgagccggaccgggcggcgtggctcaagcagagtaaggcgacgcactcggatgaggtcctcgagcgttctctcccacatccgacgagaagcgcttcctgatcgagggctagcgagggaagaggggtagtggtcgggtcgaagcttggtgagttgttgctccctcttcatctcgcggcgcggcgtgagcggcaggcgcagcagcatgcagcctgtgcgatcgacgacggggtaacgatggccgaagactcttcgctcagccccgagcaagatgctcacagacggacgacagacgttgcgggaaggtcatgacatggcatagaggaaagcgctctacttgcggaccttgcccttcttgcctcccttcgacggccgtgcgttcttctccttgcgctggagagggcgggacgggacgatagcaggtcagcgaaggacggagagggggaagggcgaaagacgacaatttaccttggccgcaaggtcacgctgcttgcggatctggtcggcgctccggatctcgttcttgacggcgccggcgttccggccggccttgccaccgacgccgggtttgccgcccttcttgcccgagggcggcgcgccgccagcctcctcggctgcggctcgtttcttgccctcgatctggcgcagcttgcgctcgtacgagttggacttggggtcgagcggcttggcctcggtgaccttcgtgtgccggtacgaccgaccgtcggacccacggttgccggtcgcgccccggccgtacatctctggctcggcctcgccgacgcgagggaggctcttcttgttcttggccttccactcgtcgaagcggccactcttgaagctcgccgggagacgcgcgcccgactcggtccggagcatcttcttgttgtcggcaccgatgccctcaccctgtacaaacttcttgttcttgcggtcccacgtgatctgcgacgcacgctggacgcgggcgacgatgccatcgtcgccggcaaggtcgaccgtgacacccttggcctgctcggcaaaggacgcgccgtcgcgcatcgaatagctggaggcgcagtcaaggggcggctagtgtcagtcgcagagcaagccgagcactgctggacggcacaagagacgtaccccttcgtgtcgtgctcggcactgctctgatagtgcgacatgtagaaggccgggtccttgtactcgccctcggccttggcaggcttcttcttgaagtcggtgaaggtctcctgcaaattggcgggacgcgtagtgcgcaatggtcagcgaaggggtggagggcgggcgggacgcggactggacgcacctcgagatcgctgtcgtcggcggcctccatgttgacgttttcgacgtcgccggtctcgacctcgccctcttcgataccgccaaagatgtcggccttctcggccgccttgttgatggccgtcttggtcgcgaccttggagagcgtccgccggcgctcctgcatcagctggaacgcggcgttcttgccgcgggcgccgacctcaaagatcgtctcggtcggccggaacgagttgacggacgcgagcagcttggcccgggcgagcgccatgtcttcctgcgccttggacgcggccggatcggcggcgtcgtcgcgaccggcggcgacaaagcacgggtgaagggcagcctcctcgccgatcgagccggcgagaccccacgtcgggtctttgctcatgtcttttgccctgcgatacgactcggcactcgccttgccgttcgagcgctcgtacatggcctgacccttcttgacgacggccttgaggacggggagcgagttgcactgctgagtgagcgaggtcgcgatgtactccatgtccgagtcgagcgtgtcgcgcgggactgagccgaggaagagctgcgacttggcggtcgacgagccctcggatgcgcgcgccgtatggacatcgacgagcgacttgccgaggaagagctgcaagtcgaggaagtagggcagctcggtgctggtgacgaacgagtaggccgagcccttgcgaccggcacgggccgttcggccgactcggtggacaaagacacgcgcgccggtcgggaagtcgtagttgacgacgttctcgagaattgggacgtcgataccacgggcagcgacgtcggtgacaacgaggatagacgtcttgccccggcggaagcgctcgagctgctgctttcgcgccgactggtcgagcgaaccgtaaatgtgcgagacggcgtagccggtcgccgtcagcagcgtattgaggtagtcgacgtggtgcttcgtcgccgtgaagatgagcgtctggtgcggcgccatctgcgggtacttggacggccgcgtaaagttactctttgacccgccccggccccggccgcgaccaccacgcccacggaagccgccccggccgccgcgcttcttgtcgtcgtcgtcgctgtcctcctcctccgacgtctcggcagtgacctcgtctgggttacggagcgggacctggatgacgtcgcgaagcaggctgagcagcgccgcctccttctcggtcgccttgacgctgaggaacgacatctggaggtcctcgctaatcttgctctcggcgtcgagccggacgagcttggggttcgacaggccggctttggcaaactcgacaagattcttgggcagcgtggccgagaagaggagcgtctggcgggtcggaggcagccggtggagaatctcctgcagctggacctcgaagcccatctcgaagaggctggaggagacgggatgacgggtcagggagtgaccggatgacgcgagctgattggaacagagacgtaccggtcggcctcgtcaaagacgatgtactggaccgagcgcaagtcgagattcatctcgacaatgagatgcagcaaacgaccgggcgtggcgatgatgctgcgacgcagagacgagagcgggtcagtctcgggctccagctggacgagtgcaaggtagggcagactcacacgtctgggttgctggcaatcatgtcgaactgctcgtcaagaccctctcctccgacgaccaggccccagcggagcgagtcgccgcgcgagtcatcgtcaccgtcaccggcatggccgccgccgccgcggaagccacgggccatctccttgccgaccttgaggacctggagcgcaagctctcgactcgggcagaggacgacaccacgggcgccgaacttggtcgagtgccggccctggaggcgctggatgagaggcgcaatgtaggcaagcgtctttccggaaccggtccgcgacatggcgacaatgtcgcgcggcggctgcgcgagcagcgacgggatcgcctgccgctggatcggcgtcggcgtcttgtacttcttcatgatcgacttgagaaggttgggcaggaggcctggcgtaggttcaattgtcagtgatgtttagtagagaggtggtgaagtgaacgcacccatcgactggaacgagccgccgccggtcgcctccttgacgcccttgccgttgtcgcccttcttgccgacggccttcttgacgacatccttgccggcggcgacgttcgacttctccatcatctgcagaatgtagtcgtcgtcctcgtccgagtcgtcgagcggcgtgatcgaggccgaggccaggcccttgcccttggccgacgagctcgctgcgcccgccttggccgacgacgaggacgggccggcgagcgagttgaagatgtcgacgtccgactcgctgtccccggcgtcgtcgccgccatagaagctgccctcggacgacgagtagcccgtctggtcgagaccggcatacgtctcgccgtcggcggcaggcgcaacctcctcgtagccgctgccctcgctctcctcctcgcgcttcttgaacttgtcagcccgcttctggagcttgtgggccttccagccctcctcgggccgctcgcgcttcttgtcgcgcgggtcctcgggctcgacctcgccctcaaactccttgcggccgccgtccttgccgcccttctttggcggcgcaggcgcagctttggtccggaaggccttggctccgccggcgccggccgcggccgaggcgtgggcgcgcgagcccttgagcgaagggaggttgggctttttgcgcttgagcgccgagccttgcggagcgggcatggcgggcagagactctgttgaagaggaagggcgaggagggaagtgtgtgagggtcggagggagcagctgctggccggcgacgaccgcgcccggcccaaattcgtgcctccactttcgcgggcgaacgacccaagtgcacctgttcacacgaccgtctctaccaagtgcgcaatcttgtctgacaggtacgctgaagttggcgagcgcgatacgacgtggacccggcacaacgaactggccggacagcaagtctgcgctcgagggccgtccggagcgttgccaagctcgatcctccccgtgcccctcaacccgccaactcctcccacccacggccccgtaatcccagtcgacacgacgtgcgcctcggctcaagggaatctgtcatgagccatcacatcgagccttactccgagggggcctcgatggagccgtcgtcaatggcctcaatgatgtcgtgggccgggcggccgtcaacctggagaggggaatggagcggaaagtcagcgcgagcactcgagctggagctcagccggccaagcgcgcgagcccggccgaagctgcagacccgcgacgcgagcgaacgagacaaggggcgacgtacagtagcgccgacggactgggcggtgccgaggatctccttggcgcacgagccgagcgaggtcgcgtacgacttgggaagcatgatccgggcaatgttccagatctcgtcgagcgggatgttgccagagtgcttgacgttcttctccttcttgcggtcacgcgggggctccttgagggccttgatgacgagcgacgaagcagagggaacaaccgaggcgacagcctgacggttctggatcgtaagctggacggtgaccttgaggcccttccagtcgccagtagccttggcaatgtcctctccaaccttcttgggggactgtgggtgaggggagcgcggcggcgatggtggtgagctgctggtgcctccggcgtcgcgaactcaaggccgtggtcgggactgaccagaccaaggggaccgatcttgggggcaagagcggacgaggctccaacctcacctccgacggcacggaggtagatgatctaacgggcgcgcagggagcacgagcaaacggatggaggtcagctggctgctcgcccggagatgagcccgtgccccgtccctgcccatccctcccagtgctgcagctgctccgagcggccccaagctccagcccggacctcgccaacgagacggccctctctctcaagcgcgccgctccctccggcactccgagtgcctgaggtgcgcgcccaagggagagaaagggcatccgtgccgcacggtcgtgctgccttctggtgctgggcccgaagctgctgctgctgttgctgctgctgctgctgctgctgctgctgctctgagaagggggcaggcagacgggctgatccctccgcgatcgagctcgagggtggtcgcaccttaacctcgctggggtcgaacttgggctgaaggacgagaggaagcggacatcgacgcaaagcagacggtcagcacgacgtcctccgactgggacatgcgcaacagaacaggacgtacgggcatgactagggatttacggttagtcgggtggtcgggtcggcaagggaaggggaggcgacagcgcgagcaacgacggggccgcctgcgcgcgcgcccgcccgcccgcgcgtctccctacgcagggcctgctggctccggccacgtggcccagatgttggggtcagttgccaggaaattgggctgacaatttcggctgcccccgcgatgtcaccgaagccggcccttgataatggctcgatgcgcaaacaaccaaggccctcaggctcaagtgagcagggagagagcgagtccgggcagcaggaagagcgtaccgagtaagagtctgctgtctggcgacgcgggcaggcgcattggcaggggttctttgcgaagaggggcgatgaggcgccaggttggcatgagtatttgtctcggccaggggcactttcgactggtccacccgcgaccctgacctgctcggtgcggcagtatatctgcagctcagcatcgcacgatcgtgcacttttcctggacagaccgatccgacctctcagcaagcggttgtgcccctcgtcgcaccaccctcgcccaaaggcaactgcgaggatgagcagtcggtcactcggtagggaagagcagcatgaggaggctcatgaatcaggcgccggcacttggcgtggagaacgggcgccgccagagaagctggagatggaggcgatcagtcgccagagcggacactgagcaggatcgctctggagacactcatcaagcccaaagctcccatccgactggtcgaggtcgatccgcggcgactgttggctttagccagcgtaagattaggtgcgctcgtgggatatgccagttgtcggcgtttagcgcaggctgagagagtcgcgacgaggcgtttgcaaggtcagcggcgctcgacagattccgtgcagagcgacgcacctggagcgtcaggccgtctcacgcaatgatgatctcggcgaggccaaggtcaacatcgtctttggagacggcgcagctggccgttcgagcgtcgcctaaacgtcaggcttgacagtcttccggccggcttcggcagcagacgcagacgaaattcaggcagccggcctcgaatccgtggcggacattcccgcactgtgatgcagtggtaaagcttccctgaacagcagaaggcgtcatctgatggagtcagctaccacacatctggcctgcgtgacacaactcgttgagcggcggcgtgggtcgaagccgacgctcatgtgagctggcagcgtccggaggcgacactgcctttccaatctctggcaaaggcgtgtgtgctcgttggcagttgccatgctgaggcgccgaccgccgccgagcagccaatcgccacctcaacatcgagcgacctcgacccgctggggctgtcctcgggacgacggggtctgcccaatccggcctgcctccttcagcagaacccgtcattactggatagccaagccatcgttcggtgtcagcgctccgtcggcggttagtgagcgtctaaaggaggtgagacgaggaggggaggagcaggatgaaaaggctcgagatgggcgatctcgaggcggcctttaagcacctcctgaaggctgtcgcatgcgaccccttctggctgcggctcggcagtgcaaagggcgcagttgcgatgctcgtgcatgcaggtgccgccggcctggatggtcgtcctcgcgatccggggtgaagggagaatgtccacgaggtgagctgctgtgagcgagaggccctgaatcgcacagaggccgagagcctcaagcagggtgatgggagcaggcatgctccgagaccgcggtggcgttcgattcaaagaaccagccggaggccgctgccaacgctcggtgcgcccctactcggtcaaggtacaagggtcagcgaggggcgaggcagctcgtcaagtcagctggacagggctcgacaaggagcgcgcttcagcccgtccgtcgtcccagaagtagttggcgagggctgggttgcagagcttgtgcgtgcagggtgggcaagtcgcggctgcgatcgaacccggtgggcaccccagttctcctgcggtacagccgccgccggcccggcccagcggtcagcgagcggagcgccagattgcagatgcacacgccgcccaacaggaggcccgaggcagcgtgggagtcgtagagatcgccttgtagacgtcgtcgagacgcccctgtgccagcagcagtcgacgagatgcatggctggaggatgcctgccgaccgtcatcgtcgttgtcggtagttgcgaggtgggctgagcgctcggcagcagcgtccgcgggctgcaacaggtgacgacaacacatctggtcagcatgggctctggcagactgacgcaaaaagagcaggtgctgaggtaaaaggcgagtatctgctagctcatctgaggttccgaaacgtggatggcgatatcagccagccaagggcatcaggcagggaaggtcgcgccgcgctcgagctgccgccgccagctcccctcggcggccgctcggtcgagccagctctcaccagtcttcggcgacttccttcagcagctcgagcctttcaacgcccaggaaggcgagaacgaccggcatcgtgtcaggtctgtcagcccggtcagaagaaggagggccgtggtcgagcagtcggaatgggcgtcgagcgtcgctcggcttggcgatgatggcaagcgctgcacccggtgtggtcgatgagctgtagcgagtagcgtcgtacatcccgcacgctggctgaatgtccagcgagacctgaagctcgagaaggagtcggtgttgtgggctcgagcgaaggacgagcgaacgaaagtaaggcgcgtcccgaggcgcgcgcgccgcgcgacagggcacgcagcaggcccggccgagtcgacgggcttcctctgtcgagcgaggggcgaggctcggatagctacattggcaggcatgtctggtccgctgagctcgaccctgtttgcctgagtagagccaatcctgagagacgttcgaaggagaggtatgagctggccctgtccttcttcccctctccaccctcgcgccgagctccctgtcgagcccgcggccatcactctcactgccacctcttcgccgtcgccttcagcctgcttcctgcggcagaacttctcgccagcatgaaggccactccgtcgagccgccctcggtcttctcgcctgtcgggctcaggaacgccggccgggacggcagagactcgtgccttcctttcgcttgtccggtcgtttgcgccgtcgccgctcgctccgccgcctgttcggtcactggccgacctgacgtcgtcgctgccgttcgctcaactcctgtcggctctcgatccgcaggcgttctcgcttcggacgctcaagagcccgccgcggggcagcaaggatgagagcggtgactgggtcgcagcctacaacggcttgcggcgcgtgcatcgtgcgctcgtcagctacgccggtggatccgacggccaggagtggagcaaggtcaagctcgacctcgcagccatgtccaagggcgacacggaagaggtgctcaagttctgccgcatcctgtttgccatagcgttcgtcccgccgagcactccgatatgcacgcctcgcagagcgtcaatcgggctgacctgatccgggcggaacaggatacaagtgacgccgggcaatgagcttctgatcggcaagatccagacgctcgagcaggccgaccagcaggccctcatgattgcactcgagccagtacgtctactggaggctgagctgaacgccgcgcagcgcgacgccctcttttgacgcgctcgagctcacgccgccttgcccgcccatccagtacttgcccaaggtgccatcttcaacctcatctctgacgaaacccgccaaacccgctcctctgccgcaagcgaatggcgacagcagtgcctctcaggggcaggagcgcgagcgtctgcgggccgagaacgagacgctcgaagaggctcttaccaaggtatccacagagcgcgacgcactccgagtacgactggtacggcccacctcatgcgactgccaaaggtcgagctgttcaattgattgcaagtctgacctgtgccgtaggacgaggctcgcgctgccccgtcgcaggcctctgtttcggtcgagagccaacgcgacaaccagttgcttgtgcaggaaatggaccgcctgaaggccgagctgtaagtgttgctcgagcgctgagcacagtagctctctgtcgttgatgtgaccctgcctattcacaacaggcgccagacagaggatgccctgtcagaggtcgagtcggctctggaccggcagacggggacggtcgaaatcatgacgaagcgcgtgagttgcgcctcaccgatggacgccataaatctgccgactctgatctcaatatcaacggacccaggtcgacgagctcaacgcgactgtcaaggagaacgccaagctcaaggaccagctggacgagtgagctgcgctgtcctgctgctcctcttggtgacccactgatggtcccactcacccttaggctcaggcacgcatcagaccgtctccagaaggccgaatcggccaacaagaagctgagcaaaaagctcgagcagacggccgacctccgccggcagatgaaggcacttgaggacgagaatgctgcgctcgtcgaccgcaactctgcgatggaggatgacttcaagcggagcgcgacgctgcggacgctggccgactcgtacaaggcccaggtcgccgagcttgagggccgtgagcggacacgctcgcgagagcttaccggtgcgtcccgagaccggcaggagatcgtgctttccgctgacgttgactgcgcgtcttcaccacagagctccgcttcacgctcgagcagacgcagacgtcgcttcagcgagctgaggacgagctctcgtctcaaagggatgaagcagacctgacgagggagcgtatccacgagctcgaggttggcggcagcccaacgtcgccggcgggcgatagcgcggcacgtttgggaaattcgggcgcagaggccagcgaggcgcaagccgcgggtgacctcgatgacgcgctcagcggacgaacaaagaccgagtacgtcgccgattaggtgctcaactttgccctcttgctgaaatgacgggtgtcttgtcggccctcagcctcaagctgcagattcggcggctcggacgggagctcaccgaggcgcgttcgacacagccatcccagagctccgacgtgatcgttctcaccaacctgctggaagacgccaagcgggccaaagagcggtacgagcgcgagtacctcgaggagcacaaggctaccctcggcctcaaggcgcagctcgcgcagatccggagcggtcaggatggcagccggttcgtcaacttggaccgttctaccggtcattctctcgttcctcactgacagtgcgacgttggctgcttccagttctgaggaggctgttgcgctgagattacgtctgcaggagaccgaggccgagcttgacggcttgaaactctcgcacgccggcctcgaggtgcgtgcgccgcatcgttatgaaagcgcctggccaaagaatgacagtctcgccatcactccttcaggtcgaagctcagcagatcgagcgggaactcaaactcgccaaggacgaccgtaagcgacgatgctcgacgctgccggcctccgccgcctgcctgattgccaatccctctcccgcagtgcgctttgtcggcaaggaccagaccgaggtcctgcgttctctccgagcctccgtcgatgcggacaaggttgagctcgacgccgaggtacgcgacctgaaggatcgcgtccgtcacatgaccgacaaagagcgcatgcaggtcgaccagatcaaccggtgcgtctggccgactgtctggccgactggttgtgagagctcacctgtgctgaacactcgactgacccctcacagtctactgatagagaaggtcgacatgcagggcgacacgatcgccaagcgtgaggcccagctcgagcgcgagcgggcgtttggcgagctgcgcgtctcgcttgccgggcgggctatcccagaggacatcaaggctcggctgctcgacctgcaggacgaaaaggtcgcgctggcggccgggttcaaggacctaagcgagcgcttgcgggcctccgagagtcacgtccagaaggcgaagaaggtacgctgtccttgctttagggcctctgcctgacattcggtcggctaatcttatctcgccccgcatcagttcatacgcgaccaggacgcaatgctcaaggacgctcagaagcagcgcgatgctgctggcaccggcgaccaatttgccgaggcaaggcagtcgtacgagacgacgatcgccgacctgcgcgaagaggtcgccacgctccaggtcggtgcggtgtgccgctaaacgctgcgctattgagctgacgaacggctctgctctcctcagcgcgacgtcaaggatcttggcgctcgctaccggcaagaatatcagcgcctgcttctggccttccagagcctcggcagcaaaatgttgcgcgatccaggtcacggcgaccgcaaggacgccgttcagccgagcggctggctcggccagcagcgccaaaatgtaagcgtcgtcggcgtcgcccacgacctgctctactctcagctgatcaactcgtattttcgaccttcccatgcagctcggcggcagcctccggcgctagactgcttgtcagacggtcaccctgctcaccctcctcgccataccgccacccgcacactcaactacccgtccaatcttatacccatagtcttcgcatcgcgtcagaacagagcaaacaggagggcagacggtgcaacgcgcgaaggaacagaaatgcgagtatatgggtcagcgttgggccgggtcagctgtaagcgaagcccaggccgaacggagagcgagcagatgttgaaagttcgcattggcatctattgcgggctgcagatgactgcgatagggcgaggagcgcatcatggtacgtgactgggtcacatgacggcgtcggcggcgatgaggccgtcgtcaggccgttcttgacggcagcgagacccgaaggcgtcgagcctgagatgacttgcaaggaaggtcaggcagacttcggagcgctgagaaacgctggaggtcgcgaagcgccggctgaatgacgtagaagtatcggctcgtaagaacgacagcggcggcatgtcgcttgtgacggcctgtcaagagcccggcacgaagcgctcaaggctcgacgcggctccgccgcctgaacgggctagactcgtcgagcaggtaccttgagctccgcaggctcggcgggatcggcgctgacgcaacctgagcgagatcgccgacgacgccggcgacgagcgcgaatgcccggttggccggcgatagcagatggatgctagctgtcatcgatgacagggagggcgagcctgcgctcgaggtggacgcgtgcgaggcggtgcgccggaaggcggcgcgggctgcttctgaccggggcgagcaggttgattcggccgtggacgaccgggaaagtggtaccggtcgacgagaggtcgccgtcgtcgaccgctgggtgaaggctgagcagagacgggataggtcagctgctgctggcggcggctggcagacgcaccacgcgaatggacgtacgagagatacagacgctacttgagctgaacgggatctcgagcgaaagcgggttcgggcagcaggccgagctcgaagatagcgatgagcctccttgaatgacgcgaggtcgggcgagagacgaccggcggcggcaggcggcggcggcggcagcggtcatggcggcctgaaggtgcggcataaggcgagcgctggtggagagtcgctgttggtggcaagaagaagggagtctgtgtagaatgaggaaaacggcaagcgagttcaaggagagaagcgcggctcttgagaacttgccaagtcggaagaggcgagaagcggaaagtcagcccccggtctcgtccagcagtccgtggtcaagtcaagcgcggtcagtgtcaggctaggtgcgctgccacgcatccgtccacgggcttggaaggccgccgaggccggtacagaaggagggttgcagctggcggcggcaggagcgcgtgcgaggccggaaagaaggaaagcatgctctgtccgtgtctcgagaaggatggatgaggagcgcagcagccgatcgccgaagcaagagtgcgctgccaagaggcctcctgcaacaaagcctcctgggtcgcaaaggagctttgctggaagtcaggcccctgctctgctcgagctctgcagcaggagaatccctctactgatgaagaagggcggctcgcgactcgctgctgtcacctggcgcgcgacagtcgcgcgcgagttcggaggctcgccgccaacctccatgccgagcccttctgagccctcgttcggctccaccagtacgctcggcgcctcgacgacagcgaaccatggcagttctcaatccccatgcgcctcatttgacgtcccgccagcagcctgtcgggctggcaggctgctagcttgcccgaccccgacgccaccgaggccgcgctcgccgacgctgagttccgctgtcggaggtgacagccggcgccgtcatgcggtgggctctctcacagagcaggtgactgacatcgagaggcagcacccgcatcggccggccagaaaaggcagggcaggaagaccggacgtgcccatcgctctcgcccgagtgcgcgtcggctggtcggagggcataaaggggcatgaatcgcacgtcgggagcaccaagccgccgagggcgacgagggctcaaggcggcaggggtcgtcacacgagtcaggaatcaggagtcaagaaggcagtcagcccggccagcagctcgagcctagggccaacagagagggtggggttcatccgtcgtcggataggctcgcgaccggacgaggcgagagcgcaaggctcagtagcccttagcctgcgaagtgccgccgacggcctggcccatgaagccgatgccggtgtccttgagccggaaggcggcgttcttgccgacgaggtgggccgtcggcgccgccgcggcgacctcggcgagcgtgtagcccgtcttcttgtcgtcggggatgagcgcgtaaatggcctcagcatagccgggcgcgatcgcatactgctggacgaggtaggccttctggacgatcgagtcggcgtgctgtcagggcgggtagaggagcggtaagcataggctcaggcggcgacgagggcggagcgcgcgcatcgcacctgaaggagccgggccgtgttcgaatggaggttgttgcgctgctcgtccgtcatgacgcgggtgtagagctcgcggacctggtcgtactcgctcgggttgccctcgtggcgcgagtggctcttgcgcgagaggacgttgctcgcgagctgcatcggcgcctcggccgtcgaggggtcgtaggccggggccgaagtcgtcgtcggcgcgtgcgacgtgtagttgctcggctggtagatgggcttgccgctcgcgttgccgtcgacgcgcatcgtgccggcgactgggcggcagagcgggaggagggacatcagtgagggcgtctgcgccaggggtctgtcaaggacggacagttgtcgggcgagtggtatttggccgcaaacgggcagtttactctgtagcgacgagcgtggaaaggaggagaaggtggaagaggaggaggagaaagaggaaaaaggtcagcaggcggcggcgagagagaataggagcggacaggaggacgcgacgggatctggtggatgttagcgctgccgagccggtacatctgggcgtcgcggtagaagaaggctgcgagagacgagagaggggagtcaaggtcagctagggcgagcgttggccaaagagctcacgtcgatcagagacgtacagcgccagttgaggagcgggtccgggctggcctggatgcccgggacgtacgacccgggcgagaaggcggcctgctcgacgtcgcggtggtagtcctcggggttgcggtcgagcgagagcttgccgacctcgcgcatcgggaactgggcacgcggccagaccttggtcgggtcaaacgggtcgaagtcgacggcggccgcctcctcgggcttcatgacctgcggcgggcgaacgggtgcgcgagcgaccggagagcaggtcagcgagaaaggccgccaaggtgcccaaaatagaatgagcgcacctggaccatcagcgtgtactcgaccgtgccgcccttctcgatgtgctcaaacaggtcctgcttggcaaagtcggggttctcgcccgactgccggatggcctcgtcgtgcgtgaagcgctttgtaccctgctcgctcagccagtggtactgcaggcagggaaagccgaggcgtgcgcacgtgtcagtcaggcagtacagagcgagggcggagcgagcgagaggctggcagctcaccttgacgaagacgtgctcgcccgcggcattgacccaggcaaaggcgtggacgccgtaggcgttgaagaagcgccagccgaccggcgtcgagtggtccgacatgagcatcaagccggcgtgctgcgcctcgggcaccatcgagaggtggtcgaaccaggcgttgtagtcgatgaggaacgacttggggttgcgctgcctgagggagagagggagggagtacgaggcggtgaaactgtcagcagaagcgcagagcagcaatgaccgaggcaaggacgcactggctgcggatgacgtcgggtccgtggaacgggtcgcggttctatcaaaggggaggatggcagtcagcatcgagcagaggcaggcaagagcttgcaagggaggggcgcacgaagaagaccgggtagttgaggccgacgaggtcgtagttgccgtcggccgtgtaccacttgacggccatcccgcgcgggttgcgagccgagtcggggtactcgcgaccgtacgtgacggtcgagaagcgggtgaaggccggtgtgacctaaagggcgagagcgagggaagagggcggagtcgaaggcagaagaagggtcagcggaggtagagacagcaagcagcaccagacgttcgacgcaccttgcccggctggaagaagtcggccttggtgaggtgcgagacgtcctgcgaggaggagcaggggagagtagtgtcagtcggtggctacaggcaggcgtgaaagggcgcacatgcgcgagagcgcaagaagagcacaagtacgaacctgcgtgaccttgaaggagccaaacgcggccgacccgcacggatgcacgatcctgtaggattagggtggggttatgttaggtttggtcggctgggtttagggggtagggttagggtaagtcacctctcggaaatcttgctccggtcaaatgccatctgcttctcgagcaggaacgcgtcggactggacgggcaggccgccgacgttgagcgagtggaccgggtcgggcaggacctggccaaagttggacgtgtagacgggtgagtcgtccatcgccatctccttctggacgaggccggcgatccgggccgcagtcttggccgggccgtcgttcatgccgcctgcgggcggaaagatgggtagacgagagtgagcgagagagggtcagtgtcgggccagcaggaaggagggcaaggcccgagcagaaggaagaaaggccccgagaaggacggactgaagaactgagagcgctgggcgatgcgcgggtcgacgcccgggatgtgcttgagaatgttttgggcggcttccatctcgagggtgttgaggctgttgagtgctgctgctggtaaaggaggaggaggaggaggtgggtcggcggtggtgggtgagggtgatggaaggacgctaagttgcgctgagctcaagaggcgaatccgatcttgccgtttagagcgaagcggaattcttaaatggcatgacgtcgagggagaggggaaaggaaggagggagagccggtccgggggcgtgcgttccggccgccggagccggctgcctggctccttccgggtctgccgagccaggacgagcgcgatggcctcgcaagggcacagtagcgtcagcaaagaaggcgaccggcggccggtctcaatcaagtcagttctggatgagctgcaagagtcaggggcagatgcgatggtcgacctggcagctgcagcggttggtcgccggcgacaggccacgtcgacggacaagatgtcgctcggcagggtcgtcatggcaggtaaaacgtggcggcgcgcgagcccagggagaggtgtcgttcggcactagagggacggctgggcaagggtgtgggtagtagtgtcgtcagagggagggtgtccaggggtagggttgcagacggccgacggcggccgctgtctcagggcacggcagctggccgtcagctggtttgtaagaaactatttacttaaggggatagccgggatgcgacaccggattagctaagtggttaaggcctcgttcttataggtttccaatccccagttttaacgaaaatcgccagttcgaccctggcattcggtattttttgcttagctccgggaaatctggtcctgggtgtctcccagtgcttttggaagcctctgggagtcggtgggaggcggtcggagggctggaggaggaggtgcctgtcacccggcggcgtgacagcagttacgagcgtgactgcgcccgcgcgggcagcgcgttgacgcgcgtcggccggctgcttgaaggtaaacaaccttgacctcctcgaccatcgacctctccccttccttaaccctgctcggcaagagactctgtaggacccagcgacatctccactcggtcaaggcgacaacgacgaacctttcctccctcctttcattcttactgatagtcaggcatcgttcgtccggctggcagactcgagccttcccatcgagctcccttgttgaccgacgcttgcttgacctctctcccagccctccttgtccctcctccgtccagctgcccttccattcaacgtctcgcctcgaatggcagacccttccgggcctctttcggcggctccacctccacaagccgctcggccgacaccgtcgcgaatcccgacggcgacctcgcgcgagcacatcctgaccgagtcgtcctccggctggtcgcctctccggatcggcaagcagcgcccggcaggcccggtccgaggctcgtcctccctctcggcgaacgaggaactgctcgttgaggaccggccgcggcggacgagcaactcttacaaacacctcaagagcaactcgctcgtctccaactcgccgttcaagcaggagcctagccctcggcagcctggcagcggccactcggacggcgagtcgccaccgaagcgcatcagtgcaagcaccagcggaacctttggtctcggcatcggccttggccagagtcctgctcgtcggagcccgggccatcgggcgagcggcgcaggcggggtcgagaacgagccggtgtcgagcggcgagtcgtcttccgaggacggcaacgatgtccccggcgccgttgccgctcggcaagccgacttccgccggcggaccaagggtcggcagagcgctggcctcgcgacgctcggctcaaaggccaaagtaaccaactcgcccttcctggcgctgtcgctctcgcctccgccgacggcggccgagctcgacctccttccggtgccggccctctcgccctcgaacgaggacacaacgccgtccctctccgaaacgtctagctttccctcgcccctcctccagtcaacgtcgctgccagaagacgatggcaccggctcgccgccgtcgctcaagccgacgccaacgagcgagcccatcgcccttccactcctgacgcccctgacgccgacaaaaccgccctcgaacctcccggcccacgtcgcgcccgatgcgccgccgacgccgtcacccaagtcgtcactcaaggcccactcacgccaggcggggtcagtcagcaagccggcccgccagccggtcgtccgcgagcggcgcaagacagtgacatttgacgagcggcctgagatctcagtctttgagcgcgagggcagcgccgacctctcgtcggccatcggtagcgatgacgacgacgacgataacgattacggcgagcccttccctgcggtcggtagtcgacaagcaccgccggctcaggaggaagagtactcgtacgagctttcgccgagcatcccgcagcagggctcgaacgacgatctacacgacgccgctaccaagagcgacacctcgttcgagttcgacctctcacccgttcggggacttgcgcaagccgcagccgacgctgaggacgacccgctcagcagcgaccggctcgccaacctctcgctcggatcctacagctccgactacagcctgaacgagctcgacctcggccactcggtcgacgacgaagaggatcccgaggactttgtcaaccggctcctagccgagaaccagctgctgagtcccgtcccggcgacgcagacggtctttgagcgctactcggccgacgccgaggaggtctttggcgacgaagacgacccagctgcgctcagtgctgtgctcagtggcggcggcggccgtagcagcagcgggcagagcagcagcgatccttcgccccctctccgtcacgtcaagctgccccacctccgggcaagcagggccgacccgatcctgatgaacggcaacgtgctcgagccctcggccatccggggcggcagcgccggcctgacccgttcgcgctcgtcaaaggccaatctgctcgccgtcgacgttggcgcggccttcgagggcgaggctcctctcccttcgcctcatgcgcaccagtcgggtccgctgcccgacccgttcctcacggtcaagacggtccaggccattgtcaactctccggcgcacggtcgccagccggcagaggagggcggcgtccccctgggccgaagccatcacttcgagcgccatcgggcggtcggcgagctgcgcgagggactcggcaccaaccggccggctcaattccagtctccggccagggcgcaggcggtcgagcgcgacggcgtcgacgtatttggcgaaaagcttgctgtgcgtagcgcccccgtctttttagtctcgcatggtcgactgacctctccgtcgcgggcgtccgtccagctcataaactcgccggcaaagcaatctcaggcttcggtcgaccgctcgcttgggcccatcagcccctactctctcccgtcactcacctcccagtcgccccttctattcggctcgttcgacatggcgacgcccgatccggcggccgatgcctcgacggccgagtttggcggtggcttccagtaccggccgtcatcgtcgctcgagcgcctccagcagggcgaggtcggcggcagcgtcggcagctcgggtggccggagccctcgactcaccaaggagagcatccgtcgccggatggagctcaaggctgctgcggccgctgcaggcggcggctcagccagcaagcttgatgctgtcgctagccgaggccttggccttggtctccttgagagtgccatcgccgagggcgtctcgtcaccgagtagcggcagcccggtcaagaatgacaagccgctccctccagcgccgacttcagtcgagcggccacagcggccaacggtcctcgtcgacagccgcgcgccgtctgccgaggagatcctgtcgaaggagtcagcgctcggcaagctcgccgctcgctcgtcgacaagtcttgtcgatgacgccgaggcttctgcggaggcggcgacgcactcgctgaaggaaggcagcggcaaaggcgtcctcatctcgcccgtctcggcgacgtttgccgaggcctcgtcgacagccgtcgaggaggcatcagcgccggcagtctcgatcccccggtccatgtcgagggcggctctcgacgcgcagctcatgccgcccccgccgctgcccctttcgcgcgctccctcgccggcgcggaacgtcatccgagcaccgtcgccggcttcttccgcgcagagccagagcggcgacgagggcgtcaccgcccggtctgcgtcgatcgatgcaggctcggcttcacgccgaacgcggcctcggaggtctgtctcgcacggcgacgtcgctgaggcgggcgcttcgtcgtcacaggcaaaggctcgtgaccgcaagattggccgcctcagcatcggaccagccgctcgcaactcggccaatatgtcggatctcaacgaggagttcgatcgtatcggcacctcgaaggtgagttgaggatctcgcgccctcccgacgtctatgtcttgctgacccgacgccctcgttcgtccattcagaagcactacactgtcatcgagcacgagccgatctacgtcgcctcggacgacaaagtgtcgcacagcgtgcgctcaggcgacctcgatcgtggcaaggcctggcgctctgtcaagcggccgtcagatatggtgcgtatcatcccggaccttctttggcaagatagcacactcatcttcgttctcgaccctcctcagaacgagtacgccgatgagatccgcgagatccgcatgcgcgagaagcccggccgggcgcacgctaaggtgtttgttaagagtgcgtccgactttgggccgacatttcgctcgcaacaaagctttctgctgacctgcactgctcttcaaaccctcagtcgtcggcatgtcggaactcacagtccctcttcagtctagctcgcaaacgagcttccggatcgcgctcaacaacggcctccactccgtcgagacggcatcgtacccgctgcgctccaatgtcgaaattggccaggagtttgagctgtacgtccctgatcacgccaaaggaggcttgattgaacaacttattgacccgacctctcggcttcctgcagcctcggcctcgagaacctagagttcagccttgcgatcaaggtgaagaaagacaatcacattgcgtccaggctcaagtcgctcaacccacctgctcctcgagaggcgccctcgacgccgagcaagaaggagtcgggcttccggaaactcatgagtagcccgcgccggacgcccaaggcgtcgcctgcccgaacgccggtggctgcggaagcaccgcctcaggacgagctcgtccgctacctcgcgccagacggcacgctcgcgaccgttaagatcgtctttaaggacattgccgctcgctgcaatggccagctgctctcgcttcatctgccgctgacgggcaaatggaacgacgactcgctcgcctactcgtcgcgctttgccagctctgccgccgtccgtcggagcaagacgatcggccggctcgagctccagctcatcatgattccgtcgctgccgggtctgacgcaggaccagctgccccagtcgctcgaggacgccgtcgtcggcctccgtcacgtccgctggcacaaaatggattactacagcggcacgctcacccagctcggtggcgactgctcggtgcgtaatcgagcggactttcaagctccacctttccgttggctgaccagctcgccccctctgccccaaccagtcatggcggcggcgacagatgcgcatcatcggaggcgtgctcgaggcgacgagcgacattaccggcaagatcaccgcccggatcgacctcgccaagatgacggcgatccgcgacttcaacgccgaagaggaggctgggggtgacatcgaccggccgatgagcgtcgagcggtcctttggtctcgtcttcgaggacggcgacgaaattcaatttttcgccgacaggggccaagacaaggctgactggtgcgctctttcgtgcctatgcaccacctatcctaagctgatcctcaagaaccttcctctctgcaggctcgcccatctcaacgagctcctcggccgcgtaccctcgctcccgctctggtccgagctgctttgggtgaagcagcagcagcagccggcccctgcggctccccggacgtcgcaaccaccggcttggcgctaagcctacccgtctcctatcctgcccctttcccacccctctctgtctcctctctttgcatcttcgctccatcggacacttggcccttctggcccccacgccctcccatgcccctgctatgttgctctgcacctccgcgcttcacgctctctcagtctacgcccctgttcgcggatcctcgtgcctccttcacttttttcgctctttgctcctccaccaccgtttgtctcgtgatgtctttgcttgccctgctttgtctcaagctcgtagcaatagtttcggaggacaatgcgatcacatcaggcgccactcgcgcgagaagagggcctcgcccgtcaggtcgagtagccgatcgccgtcgaggacgacctgccggttggccgtcgctgccgcttggatttcgacctgcgaatcagaaagaaggcgagtcagcgtctgcagaagcagcggatgaacccgtggctgccgacctaccgtgtagcacgacttgaggtagcgaacgtcccagatctgcttgcgcgagagcaaggcgtcagctaagcatgcgcgatggcagttttgggccgggcaagacgcacgcgcagattgcccctctggtcggcactcgcaaagaggttcttctgccaggatccgcggacgtattttgaccggcctttgctgctgccgtcggtgccggcgccgctgccgctttcaccgtcgccaaacatgaccggctggcgagtcggggacgagcgagtgtcatagaggctgaactgctggttgacccggttggtctgagaaagggggagcgattgaaacaggtcaagaagtggtccgccaagactaggttccaccagtgcgcacctcggccagcagcagagcggggtgtgcggttgacagatgcagttggtagacgccagtcgtgcttctcggcaggacccaatcagacatctttgccttggcgagagcgaagcccaggactggtacaggtcaatcaaatacgtcagtgagcgtacgctttcgaccggacagagtgggagccgactcactgcgaccgtccgcgccggccgagtagagccactttttctggtcgtcccagatgagggcgtcgacgcgcgaggtgtggtcggtcgagtggagcgcccagagcttgcgccgactgtcgtcgtcaaacttccagagcttgacggcgtggtcaaagccgccagtggcgtagaccgatgtcgagagcgtcgtctcggccgtcaaggccgtcgacggcagagccgcgcagcacgagacgcccatcccggaatgggcctggtcgtcgatggtgcctgaccggacgcgttcggccttgttctgtggcaaaggcgaagacgagcgcgtcagagcagtaatagaccggatggcgcagtcggtcaacggcttaccttgcgcaaggtgggtgtcgagacccagctgatctgcggccgcagctcttctgcattgcgacgctggcggccgacgatcagtcgattgccggcaaaggcgatgccctcgaccgactcgccctcggccatctcgaagtggaccgttggtcgaggactggcacgtgaagggcggacgggcggtcagtacgcctgatgatcggtcggcaagagccagcaaacacgcactcgagcgtcttcttgtcgaaaaactcgacgacacccttatggtaggcgcaagcgtaaaactgctcgccgacggtgatccatcgcgtcttcgtgttcggctgccgtggggcggtaagtttcttgggcgcgtaaagcttgacttcgggtggcccgtacttgacgcgcttggcgacggcgctctccttgggctgcttggacgccttgactttggccggcgacactgtcttcgacgtcgacgtctgccgctcatcgtcaaagctgagggtcaagtcgacgacgcgttcaggctccttctcctccttaacctggaccgtcagctgttgaggcgagcttccaacccgccgccgcttcttggcggcccaaacgggctcgtcgagtgcctcgtcgaccgacgttgctggtgactggcgccgcgcgacgactgggccgttcggtggcggtagcgaatggcgctggctcgagaagagagagttgtgcggagacgaaggcaggggcttcacgtcgatctgcggcggtgacggaggcggcttggccggcgagacgtacgcagactgcggacgtaggacctccggctcgacaatgggctcggcctggtcgctcggctcgacaggctcgttgaccagctcgagattggaggccaggtcgatcgcgatccgttgcccgggcagaaaatcttcgtccgaaagcatgcggacaacctcggccgcgtcgtgagggtttgaaaaggtaacgagggcaaaggcctcctggaagtcgacgtgcttgctgcaaacgcgagaaggcaggccgcgcaatcagcaacggatggccggagacgactctgctcgagcgagacttacacggagacaagcgtgccaccgatgaagcgccgaagggcaagctccttggtgtcgatagggagatccgagaagacgacttgggatggcgtgccaaagggctgcggcccactgttcacggccatcggaagcggctctttgtcatctgcactggcctgcggcggaggaggtggcgacggttgctgtaagggtggcggaagcgggtcgaccggacctggtgcgctgggagagtgggttgtaggcagagatgtcttggctggcaacgcgagcgtagaagcaggcgccgtggtggaaagcgccgactcgactttaggcactcgttctggcgctgcgattggcgctgcagccgacgctggcgcaggcgactgcgagacgtcgctcctctgctcgctgccgccgagcgacttgcgcaacgccttgagccgcttcttctcctggagctcggcgagcttgcgctgggcctcaaggagggcggcctcgacgtcgtcgtcgtcgctgtcatcgctcgagccgatggcgatgccgccagtcgccgtagcaggcttgagtgccgggtccaaagcctggggtggtagcggcggaggcggcagcgctgacggcggaagcggcggtggtagagttgaaggaggcgcaggggtcgacaactgctcggctggaggggctggacgctccggcgcttcaacctgcacagcagccgatggcgctgctgtggtcgtagatggtaccgtcgcctgctcgtcactggcgacagggcgcgcggaaagctcggcggaaggccgctgcttgtgatccgacgacgatacgaagggcggccgcgatgatataagatcgttgacagccgctgcgagaaggagaagggagcgtccagtcagcatatgccttctcgtgcccttctcgacaaactgcggatagaccaaaggtttcggatgccgtgacgacctctcgcgccttgcccttgctgtcgtcgctccctttgacagaagtaatggccgcggtcgcctgctgctgctcgacctctgaccgatcgctagtgcgactgttcggcctcgagagcagcgcctcatgctcggccagcggaacggcgtcataaactgccggccgttccgaagccgcgctcggacgagtgctcagaccggcgctcgcgtcactcggggccggctttggtggctgcggcggccgagcataaggattgccgttcgcaggcgacgatgagcctgagccagagccgagcgactccctccgcatctgcgggtgagggaggggcaccgctgctttcggtccagccgcaatgaaaggccgcgtcggaggaggccctcctactgcgccgtttgatctgggaaccggccgggcttgggacgaccatgcgaccggcgccggtttcgacgtcgaggctggtgccgggatgttcggacgatgcggcggcggcggcgcgcgttcgaacggtaacgacaattgcaagccggtcggcggctgaggcgggtagcagacaggaggtcgggcgtgagagttgtggttgctattgaagctgctgccgccagcggtcgaggtcgatgcaactggagcatgccgtggctgctgtccgactggcgtcggtcgtggagggtaagctagcgtctgctctgggccgccgtggaagagaggctcccgaggacctgctgcgacaaccggttgtggaggacgccctgagctggctgctgccggcatgcttggtcggccagagccctgagcagctccagacgttgttgcagtcgccgctggacgggctgaggtcgatgacgaggcgacagcgttgccgccttcctttgtcggaacagcagcagacctcgccgcgccagctggaccgccgttccgagccgcagacgaggattcagctgagctagccaatggcccagccgagctgccgcccggacgactgttggtcggcgggatcctgttgaagcgcggggtgaccggcggaggctctcgccgagggatggccgtcggctcgagcgtcggagggaggttgccggccttgagcgcttgctctgagcgtgagtcgcccgattgagagggcggccagaaaagcgggatcgagcgattcttctttggcgcgctcatccctgcggaaggagacgctcgtgacggcttaggtgagggttcgaaggtaaggagctcgagctggcgcgtgcacgaggggagggcgcgcgtgcgcagaagagtacgcctggcggccacgccacttcgctactttgcaccagtttaaagacggtgagcagactggatctcatgatagatgtgcagcgctcgcgcttggcagacgggcagtgttgccaaggacagcggtctgccggtgtgcatcgcagcgttgcgccgagactccgccttgatctctggcgtgcagtgaaacaagtgccttgcacgacgacgacgtcaaacttggctacaggggcagtcgctggaagaccaagcggccgagggcaccgctcgcgacgacatcgtccttgccgccgtctcggtttgtccaaaacgcccactcgtactgcgcaaagtcgcccctcccggcgaggtactgcagggcggcgctagaagtcagtcgacctggatacgatcatcgagaacgtgagatcgttgacgtacttgggtctcctcctcgtttgatggctcgcgcaggtgtaccttagggcttggactgagggcttcagattcgtagtttgccagcacaaacgtcacgccggacccggttgaaggctcaggcaccccaagcagcctggcaaagagtaagaaagagccagtcaggcctctgatcatggaaacttgcaagtcagtcgaacgacgtacgcggcaaggaagctttgaaggtcgttgtagcgctcgcgagtggccaagatggtgacggttgcaatgccaaccgtctttgacgggctgcgacaggcgtcgaggatcgtcagccaggcggtaagtcggagtcgagtacagcagcacgactgactgctcagaaggacgatctggtacctgtcaatcgaaatgagtccgtgttagcgaggtcagcagcgtcggcgcggctcagagcaccacgactcacgcgccatccccgaggcgacttgtcgccgcagaagaacggcagaccgcctcgaacctgagctttgcctggcagggtgacctcccctggaagcgtctccgagtacgtcgatcagctgatgaaaggctgaggcgatcgtcaacaggacgcacactcgagtcgcttgccgtcaggcctgacccggccgccagcgaccggctcgcaataagccagcgtctcgtcccctcggccggcagcaacctcctcgacagcccgtcgctggtcgcctgtcggtccgccggagagcgcatagtcgatcgggccggccgtctcgcggccccacatatgtgaggctggcggcgggtcgacgttgaaggtgatgagctcgaggtaggcgccggagggcgcgagcgggatgagcgagttgctcctgcgaccggatcgaggcgattaggagactcatcagcataggcccgcgatgcttcagatgtagaggagcgcacgtgaggccgtcggcgtgggttccgccagggacggtctcgaaataaggtgctagctcgcggatcgttgcctcgagcgtgcccggggccgagaggtggacgagatgatcgagccgaagctcgcgttcgattgctgcgggaatcatcgctccagataacttgcgagacgcagagatcgctgctggctagatttggagtgaagaagcgatgggtcgaaggcgagaggatgaggagacggcgtcgtcgcaaggctgaacgtagtagagagcaggtcgtcggcgatggccgggccgcgtgacggccttcacagcgacagaaggtgaacgcgatgcatcaaagaaagcaagcagagtgcgccgctagggcgctaggtaggctacgtacaggaaggacgaagtggtgcgggaaacaatggatggttgaggaacgaatggcgaagggagggatcaagaaaagggtccaaagggggctcagagccggcggctccgacggcaagcgatggagagacaaatgaagagaagcgggaagcggaagggacaggcgctcagcgctcgaatcggagtggtacaggtgggcgaggagagggacgaaagagggtatcgattactgggcgtgcgagttcgtagcgtcgaactgtgttgcgcgcaagaggtagcgtcaataatgacagccgtcgcgtcgacagacaggcagagcacgcaccatcgagctccggaaggggttgttgtcgccgacctgactgcggcggacgttgacctgctgctgtagcgggccaccgcccacgacggcagcgattgagccggaccgctcgcgggcgtaagcctggaaggcgtcgtccgggcttgtaacgttggtcggcggcggcgggaagtacgaggcgacggtggcggcttttgtgagcggcgtcaggggggtcgagaggtcgggcgagcgaggcgagccgtcgaggccggtcgtcgtgatggcgagcgcaggggcctgtcccgaggccgacgcttgtgagccgtaggacgaggcgcgcgagacgacggacgcccggttggacgcgtcggtcaggacgccgagcgctgcggcagttaagagtgtcgatcagcagtcggccgggactctttactcagcttggaagtcggacgtactctgcgcgccggcaaactggctcgcccgccggacgagcttctcgccgtcggcctcgacgaggttctcttgctgctcggccggcgaacggaagccgtcgacgtcgtcctcaccgagaacccaaggccccgaggtctggtcgggcgagagcaccatctcgatgctttccttgcgctgctgctgctgctcgccggccatcgactgccgctgctgcgcgaacgtcgacaacggcgtcgggacgacgttgatcgtcgttgaggacgggttggtgtagagcgatggccgctggcgaagcgctgcgcccatcgcacccgagagggatgacttggaccgctggtggccctgcgagtagaccgagttgagcttgctgttgtggccagcggcggcggcgccgtcaaactcgctcgcgaacgagacaccgcgcgacttgcgttcggccccgaattgagtccgcggccgggcaaactcggccgacgggtcgacgacttcgaccatctcctgctgcgggagcgacgggtagtcgtcggttcggtgggcgccgtagccggcaaagttctctgaggcagagtaggtcgagtgcatcgtccgccgggcggccgtctgcgaaaaggcgcccgacttgcggggcgtgccgcccccgagcgaggcggacggaccgtggtgagacgacgtccgatcccaatgggacgaaatgaccgacatgcggttgtcgaccgcctgagaccatctgcgggagggcagaaagggagaggcgttgcagtgagtcaggccctgtaacttgcgagaggagagccgagagcatgccgtacctctggcgcttcttgctctgcttgcggcgcgtgtaaaggatgtaaagcacaacgccgccgacaatgatcgccagcgggaagaagacggcggcaaagatggagccggcaggcaggccgcccgaggcctccttggtgacgatggtcgcgataggatcaggcgagcctggaggagaagcgaggcagcacattagcgcgggggatctgagtgcggagacagatagagcgacccacccgtgtcggcggcggcggcagcgacggtgcttcctccgaccgtcgtcgtgacgagttgctcggccgggtaagtcacctggaagagcggtccaggaataggtccaaagaacgggatgagcgtcttggactcggcgagctggaactggaggtcgattgttgtcgtcgagttccacctgcgggaggtggcgcggcaggatcagtggggcgatccggccgacaaggagcgagagattcaagggccggaacggaccacttgggcaggagtgtcacctggaacttgccgtcggcgtaagggatgtaatagaatttctggaaaggaggaacgtccagccgaggagaatggtaggatgtcagcagattgagtgacgcagaaggtccggtcgagcaagctgccaatgcgaccggtctcgcgatgcaggccgcgcgcgcgcgtcgggccgacgcgaccgagtgcccgcggggggggggggaccgacggaccttgatctccgggaccgataggtgcggggcgtagagcgtgatgtcgaccatgctgtacgcgtagcatgtcgggttccaggtaatggtgatgggcttgtccttgccagcggcaaaggtcgtgccggccgagggataggtgtagagctgagcggccgaacaagctggagcgatcaaagggagccaagcctgggtcagcccttccgagcaatgacatccacgtccgtcctcgttgagcgcgtgacaagcacccgacacccgtgcctccagcaaggccattgagcgccaaggggcgatgggcggcggcgatgcccttctcggccggtgcccagacaggagacgcggagggagcttgacgcgacgacgtacctcgcttggcgagcgtccggcggcgctccatgccgcgcttctggtcaaccggcggaggaacgccatggccaaggaagaggtgggcgaagcccggtccggccgggaaccgatcatcggtagcggcggtcgaggcgaccattggaagaaggcgaacgaggtgagggcgacggcgcgtcggaaggcgaggagcgagaggaagcgcgagcgcgagtagccttgctgcctcgagtcggagaggaaatgtgggcggcactgaaaagagagaaggcaagtgtctgcaaacgagtgtcggggtcgccggatgggcgttattgaggagctggctgtagtcgtcgtcgaacaggggaggggacgacaggccggcggccttgttgacgttgctcgggcacgcggcagcgcacgcgcgtcaaggcgccgcgcgggcgcagtcacgctcgtaactgctgtcacgccgccgggtgacaggcacctcctcctccagccctccgaccgcctcccaccgactcccagaggcttccaaaagcactgggagacacccaggaccagattttctggtgctaagcaaaaactaccgaatgccagggtcggactggcgagtcttggcgctcgggcacgcggcgggcggcgcacgcgacccagtgtaacctccgctcggagggaagcgcctcagctcgagctgtccccctgcgccctcccctcaccttgatctaccactcgatcccgccaaccatgtcacccgcacctacaaacataaaggcagcccgctttgcgcccaagccaaaggcagctcgtccggctccgacgcccgagcagcgccggacgtacctcgctaagcggctcgcgagccaggttgctgatggccacctcgccaagggcctcaagacggtcgaccagcgtccgtccgctctcctagggtatcgagcgtgcttcgaaggctgacgcaaacctcgtctcgcttccagtgatcgccctcgactcatcgccgagcctgaccgcgaccaagctctcgttcctcctccacctcgaccgctactcggccgcactcgacctcctcaactcgctcggcccagccgagcaggcgacgctcacctttgagcgcgcctacggcctctaccggctcggacgcgaatccgaggccaagtctgtgattgaccaggccgtcgctgacggccatcagcttggcgagggcgccgagttcctgcaggcccagcttgtcagtcctcgccttccatctctgctcagctgctccatcctcggctttgagtcgagagtcgagaggactctggtcgcaaagcgctttggtgtacggctcgctgatggatcgcgtctgtcctcgccctcgcttcgacaggcttaccgcgcacacgactacgagctcgcgaccgagctctacgcgagccttctcccttactacccttccgtgggtcccctcagtctctcacctgcagctgtttccgccgccgtcctgagcctcgctgacgctttctgttccatcccatccgccttcgcccgtctttctttggtcccctcctcaggaccacccggcccatgccgacctcgcacagaaccaggccctcgcccagcgccgagccgacttctcgcgctctggctacctcgacgcgctcgcctcgctcgacggcggtgcagacgcgatcgacgccgactcgctcgaggaggaggtgccgatcctccctgctgctgctgcttccggcagtagcagtgggcggcaggcaaacgccaaggccggcccgtcgtcggagagcgcgacggcaaagaaggtccggctgtcggcggctggcaaggagtttccgagcgctggcgagaagaagcggcggcatgcgctccccaagggcgcggtcgacgacggcaaggcgttcagcgaggatgtgcgttgcccccttcgcatcagcgaccgtcaaggtagatgcccaactgactcccaccgcccgctctttctcgcgcagcccgaccgctggctgcccctccgcgctcggtcatccaaccccaagtcggcgagctacaacccaaactatacgagcgggacgtccatgtccaacattgcctcgtcgggcgccgcgttcgcgccttcgccagcgaagaagaaggctggcggagggaagaagaagggcgggaagaagtgaggggacgtgcgacatgtagagggtctcgctttccttaggtcggaagccctctcgcccttctccgcccctccctccctcgtagcttcaccgctcactcgcccctgccttccgacaacggacactgcctctcccttggtctcctcgccgcctagagcctgtatctaaaggcttcctcctcgagacgacctcattcagccattaagctcgagaagcggcgcctcgtcctgcggacggacaatcgcttcgatacagtgcgagggaagctctcgatcactcgcgatgaagaagcaactagcaggcgtgcgagaccctgggcgtgagcagtgaattaggtaaaaggagagatgcgatgggtgcgacgaaggaaagcaggaaatgagcagctgggtgatgcgatgaagaggcttcaagagcgggcgcgtagggcgacagcgccgagagccgatgaaagatgtgcttgcagcgggcatgcaggttggcaaagatggaaaggcgaggtggggacggctagtacatgagctggagagcggaagagggttgcgtcagtatcctcgcaaggtttgctccaacgcagaagggacggggacgcacgtaggcaatggaaagcagcgggaagcccgaaagcaggccgagccagaagaggacgttgcctgcgagggggttgttcttgatcgccggcagccggccgaccatggtcagagggatctgggccatctgaaggacaaagaggtagcacctggcgacgggcaaagcaaaagggatcggtcgagatcaggcgctgtcagtggaacttcgagatgcggcgaccgaggccccagcggatctttaacgcaccgcagcttcttggtgacgacgagcatgacgagctcatggcagcaggctgagagcaggaaggtcaggaaggtcgccagattgcggctgatcttgccggtcgagagcctgtgatgccgggcaagagatgtcagagaaaagccttgggcagtaagccgagtgcgcgacgcacgaggcagtgtagacgtgtcgaaggagaaaggtctacgggaatgatacagagcgttcagctaagagcaagcgcaactggtcatagcagccaagggacatacgtggaccggaacattccacttcttggcaaactggtcccaagaggtcgagttccagaagtcctcagcaaatcgccggtccgcgaaactgagaagcagaggagatgggttaggtttcagcaaaagtggaagggtgagagaacgagaacagggactgactaggagagctcggcaaagccgttgcagatgcactcctgatagacggcagaggggccgacaacggtcaggaagcacagcttgaaggcgaacctgtgtgatcaagagcgagacatacaaatactgggaggagcacggggctgtcagcggcggcgaccgagggccaaacactcaatttattgaaactcactgatgtagtatatgagaagatagtcgagtatcatcggcaacgcgaggttgatgaaggtgatgaccatcgagtcgcccttctttggcaggaccggcactgggagtagcacggggctgtcagcggcggcgaccgggggccaatcactcaattcattgaactcactgatgtagtgctcagtgacgaggtagatgagcgcgaacgtgccggctgttgcgcaaaccttctcaaagacgtagattgggcgcattctgatggaggaggtcacgcgggatagggcgcgcggcaggtcagccaaccacagcgagggatgagcggcagaccgagacgtttcaacggcagagagggaacatacttctctgtccgaggccattcgagctcgtagacgagtgttgggacgagcaggtagtcggcgtagttgaggaccgagacgttggccggccacgtgacgcgcttggcgcccgtgctcgtcagctcggcgctgtaaagatcaatgttgcgcgcggtcgtcgcaatatcgtcgtttgggtgaaaggcgagcggatgggaggctgagggacgaagagccggctgaagcttcgtcgagagggggcccgagaccgtcgtcgtcgctgcggctgcggcgagcgaggtcggcgccgaggtcggcgaggtcgccggtaagcgcgagacgacgttcagccgttgccgaagggtggcctccgacaggtgatgcgggtgctggagcgagtcgtccgccggcgaggaggtcgtcgccgtcgtcaagtcgagcgtcgattcgctcccgggcgtgctggcctcgcttcccgcgccaaggccaacaccgttggcgctctcgacgagaagaccggctcgccgagcttcttcgcgctcaaggtggcggcgctcggcctcggctgaccgctggccttcgtgagcctcggccagcgcggcctcctcgccgccggggtgggcggcgagcagcttctggagcgacgcttcggcttgacgcttggcgagcgcaatgttagcaaggtggccgttgtgggcgatatctaatggagattggtcgtcgtcgacaaggaaggtcgagggcggataggcgtcagtaaggaggtcgagggcgggcggaaggcgacggtgcgcgacggcaaggactcacagctgtggaccttcatgagcatgaccatggcgtggagaacgagaaagccagactggacccagtaccaattcctatcgaaacggaagcgatgcagggtcagcaagcgcccttcgcaaaggatcgtccctccgcggcgcttgcgcaaggctgaaggaagggcagcccgaggagacgcacctggtgaacgtccagacgacgaaggacatgaggtagaaggtctgtacgatgtgctggacagctttgacagtgttgccatacgcccaccagccggcgctcatgccgccgacaagtacgagcgagagcgccgacgagagaacaaggacggcgtccgtcaaagcgagcatccgccagtcggccgtgatgagtccggcaaattcggacgagagcagcgaaccggtctggatgtagtgcttgatcgccgtctggacaaacaggaggaagaggccgatccagaagagggcaaagaagccccggaacgggtcgctcgcgctcgggcccgagaggtcgaagtgcgactcgcgcggctggaacgagatgagcgccttgaggctcttagaccccttggcccgatagggctggacacggaccgtcccctgctctgtttgaaacgtcgtcgagccgccggctttcgcgagcggccgagctcccgtcggatgaggtgcgggtgctgtcaggctggcgtcagccgtggccgtcgggtccagctggcggccagtcttgctggagtcggtcggcgagatacgtgtcgaattggacgacacggctgatgctattgaggatgtcattgccgccgttgctggcgggccgtcgctgctgctgtcggttgccggctgaggtcgtcgtctcgagctggtagtgggttcggcccgggaggtagcgggaggcgcagaacaggcgtcagctcgcttgctcgccgtcacaaacaggttgacatgcctcgccggcttgaacagtgcttgctttccctatgccaatgaggtcaaggtggtaggagcctacaccgagctggcgagaggaggagagctcggaggcaagctgaagccgcgaagccgtccctgtgaagagcgtcggcgcctccaatgtgctcgccggcgcgactgccgagctggctcttttaaagagtcaaggtgagcgttgactgacctgtctgccgtcggttgcttgtgggtcgggctcaagtcggaatggaggaggtggtcgtgaaagtgtgaaagcgtgcgacgacgggctgagcgagagagcgtcggcagcctgctggccgccggagccgcggccggccggccggcggcagcgtcatggctcgccagctggcagatcggcggaacggaacctggctctcctgtcaactaccaggccatactcaggcaagcagagagacgatctagctcaacattcatgagttttctgctgcagttgcggcccgtcttttcttgcagaaggaggtcgggcagctcagcggccggtacagatgcaggggctccgcgcttcagcccctttgtccctccgaacctgtcagcccgtcgctcggccctccctttctcttcgcttgctccgcccaggccaaacgtcaccatgttgagtgaaggtcctgccgagaccggggtagcagtttcgccccgccgtcgcccgaccgctggtctcttccgaccaccactctcctcatcgacttcctcctgctttttgaccttgcgcttgccgccactccttccgactttcgacttgaaccatggccagctcgcctctctcctacccctctctctttctccttctggcagcgacgatcctgctgtacgtcgcctctcatgcgcctgtcgaccgagttgaccccaaccatccaatccactcacccctctccgcgagcagctggttgtgcacctgtgcgcccccttccttgtcgtctcgccatgctcagctctgacagcctgcctggcacctcttcctaccgcagtctctacagccgacggcttcatctggggagtctactttctgcaaaagtacgttctcgcggctcttccttgtactgcaacagtatggctcctcacggccttctctgttgctcgaccgtgacagcaaccgaccagacggagggaacgcccgcttcggcacgttcggatggtgtgcgttcttcttatttccttcgcccgaccatctctgaccgccgagttccgcaggcgtcgccgattattgcatccctcggacgctcggctgggtctgggagcctcaggtaacgagcgagccgaccttgacacggacgctcgtcctcgtcccgatcggtgcgttgcgccgtgctccctttctctccttccctaagagcgctgacgggccttgcgctcggatgccgcccagccaccggcttctcgacactcgccctcttttgcctcatccacacggtccgctcggccggcggagcagcctcgccgacgcttctcctgacactcctggtgcgtctcgcttcgatgtttccctcgaagacaccggtttgggctgacgtgctctcacctcactcgcttacaggcactcatcaccagcgcaatggcagtcggctttgtctttggcgtctttgacaccgcccgcaagcgattttcgtccgacggcagtggcgttgcggccgactttgggccggcagcttggtcagtgtttgcgatcgctcttgtcgatgtttacaggctaacgatagcggtcccgggtccctcttgagcaggatgctcgttggtgcgtcatcttctggcggtgtctttgcctctgagccttcgctgactgtcttcagtctgtacgtcgcagcggccaccgcctcgcttctcatctgcctcgtcctcatctacgtcggcccctacaagcgcgcaggcgactacgagatcgtcgagaacaagacgggcgtcatcgtcacccagccggcggcggcaccggtcgctgcaccggtcgtggcggcgcctgcggtcgcggctgctgcaccggcagcgagcggcggcggctgggcgagccggttcaggaagacggagcagacgtacaccgtttgaaggactgggcggcaggagaattagctggatgggcggtgtcaagaggagaggagaggtcaagttgggctcggcccgcaacttaggatgacgaccctgacgactcttgttgcacagcggtcaagaaaaataaaggtgcaatgaccatatgtagccttctcctggcggatgatgacgaggcgtcggccagagctggccgcgatgcggccaacacggagagtggcaccgagcgactctcggccgtgtagagcgccgtcggccggccaatcgactgacgctggaaggataatcacggacgggcgtcaccgagacagcagacgagctcgacggggatccgaaagttctgccagacaccgctgtcagctcaagcttggattggcaagaggctgaagagtggcgcacttcttactcgacgtcctgcggcttctgcttggaccggcgctgtcctcgctcgcgctagcaacccgacgtctagtccttcaggccaaagtttcccttgcgctgcggcgtcgtacgtccgccgatcttcgacggcgagcggtatccgacctcggaccccgacgatcgacgatatccgccctcggagacagacgggcgacggtaaccggaatcagggttggaagaccggcggaacccgccgtcggagccagacggccggcccccgccatacttcttgttcatccacgccataggctggggcttggggatattcttccaagcgtgatggttccgagcaaagtcgacctcgacgcccgggcggagccgttctccaagaccggccatccgaagcttctcgagcgccgccgtcgcatcttcgatcgactggaagtggacgttggcgtactcgtgcagctgattggtgtcctggtgctttccgcgcaagagttcagacggcgtcccctcaaggactgagacgatgaccttcaccagccgctcgtcagagattccccacaggccagcgatgcggacggttttgctcggtggccagacctggcgccgccaggccgccatctcggcctcgtacgcggccgccttctctacatgcttggctttgcgctgctggtccctctcgagagcctctggcgttttgggccggccggcgtaaagggcgacgagctggccggcgtcgcgcgtctggctcagaatgacggccagggccgcctcggactcgtcgagcgacgcaaagttgaggaagccgtgggccgtcgtcgcctttggcttgaggacgcccatctcgacactgctgggcgtgagcccaggcacgagctcgcggagacctggggtgaccggattggagccggtcagcctccctgtgcttgacctgtccgcgagctcgtgtaacaggtcgagactcaccttcctcggtgaagcccatgggaaggttgccgacatagatgcggtccttgacgacatgctttccggcgtcccggctttgctcgcccgtcttgacccgccacgacggcctcgagcgtggcatttcgttgccttccacgccgctgcgatcaaggctgaacgaccgaaggagggttagcacgggccgagcggacaggctagccgtccggccgaccgtgctgaagctggcaaagctcctgctgccgccgacggcgactagtcgctgacgggcgacctgtgctccggccgagacgaaggcacgactgagggacatggcggggagggtgaaagggacaggttgaggtcgaggtcggcgggaggccgaaagcttgtccgcgcaggcgaagctagaaagcgccggtgccaaagccggcgagtgcagccgacgtcagtccactccgtcaacgaccctcagactttcgctaacgagaagaagcggtgaagtagcgctctgcgctgacgtggtcatcaattggcgcccttcgtctggcctgagacggcggcggtcgaccctgcccgacccccttgagcggcgatccggcggacgacctctctcgcctcgtcctggcccttggcgagcttgagtcgctcgagagccatcgccagccgcgccgactcgggcatacgatcgaggtcgtcggcggcgttggcgacgagtcgctgaccgagcgcgaggtcgtgctccgccgccggccgctcgtcgacccggaggaagcgctcaaggacctcctccgagattggcaaggggccatcacggcggacaggcacgctgcctgccgctgcttcctcctcgagaccctcgccgcgccagccgcgcgaccagaggatgtcccagacgccccggtcgacgtgatcctcgttctcgagcacggcccctatcgaatgctcgaacggtcgggtcgaccacaccggatgaggtgcgctcagacgagcccagagctcaggcgtcaggcggtcgagcgagtacgtccgaggcgctggcggaggaatgactggagcggcgacgtccggggtggccgcagcgaccggctcgacaggctccgaggcggctgctggcatcgtccgcagatgctcgatgacccactcggtgaccacagcagacgggtagggcttttcgctcgcatagcgggacaaggtgctatcagggggtcgaaacgatggtcagcctactgccgttcaggattctcctttgcgaccgcgagcagaagggacgcacgccatgcgctcgccaatgtcgacgagctctctgcccgcctcgaaccactcccaggcccaccgatttcgcttggtggtcagcgcatcccgctcgagcttcctcagccggcgctcgcggtcctcaaccgacttctctttgagaaagtcgcggagctcgagtgctggagcggcatgcacgcgctcctttatcggcggccctcgaggccgctccttggccgtcttgccgtcgtacgaccgcttcggtttcggcttctgcgcgccgctcctggagttgctgccggacgctgggccgttgcgtgagctggcagcctcgctggcggtggatgagaggtcggtctggccgaggtcctggtaggcctccgagaggttgagcttgcccttgctcttgacaaacagctgctcggtctgcatggctttgcgccggccattctttgagagcgccgctgccggcgtccgagaggcgctggaggaggctgaccggcgcgaggcagcccaggtcgtcgaggacgacgggagcgcgacgtcagcggtgagcagcgaccgaccgaggctgccgctcgcgtgagcagcagctgagctgcatgccttctgaaggagatgctgcatgcgacaggaggctcgggccaggtagagcggcgcttgtggtagtgcggtttgtcgtcaaacgcgcgtagctgaaggtgactgtcgaaggacgcaacagagcaggccggcagcgacagcaggcaggttcgcgcagcgtccgcctgtcgaacctcttgcagcacctctagcgcacgtgtcgaccttcctgatgctgcacagagacgaaatgagcggagttgagccgtttttgtatacaagtcagatgagcgagagaagacccagaaagtaagaaaggcgtgggagggagggtgtgaagaggagggcgtgtgcgggcgtggggggttcgtaaatgtgagagtctaatgcgatggtagggtgggttcgaggatgagctcgtggacatctagagaggcggggtcgttcagaagctcagaagaggaaggcgagcaagttccttagaacttgagggccttgggggcctcccaggtgaaggactcctccttgcggccgaaatggccgtacgacgacgtgagctggtagatggggcgctggaggttgaggtccttgacgatgactcccggccggaggttgaagttggcgttgatgatggcgacgagctcctcgtccgacttcttcgaggttccgtacgagtcgacaaagaccgagaggggctcggcaacgccgatcgcgtacgagagctggacgagcgcccgcttggcgaggccggcggcgacgagcgacttggcgatccagcgggccgtgtaggcggccgagcggtcaaccttcgaccagtccttgcccgagaaggcacctccgccgtgggcaccccagccgccgtacgtgtcgacgatgatcttgcgaccggtcaggccggcgtcgccctgcgggccgccaatgacgaagcggcccgagggctgcatgtggtagacggtccggtcgtcgagaagcttggccgggataaccttcttgacaatcttctcgagcagctcggaccggaggtcctcggtcgtgatctcctcggcgtgctgggtcgagatgacgaccgtgtcaacccggacggggatgcaggcgccgtcctccttgcggtactcgacggtgacctgcgtcttggagtcgggccggagccagccgagcgagccgtcgcgccgggcggcggccatggcagcgttgagcttgtgcgagagcatgagcgagaggggcatcagctcctcggtctcgtcggtggcgtagccgaacctgtagaagacgcggcgtcaggtcagccgggcggaaaaggctgcaagggagtcgggggacgcacatgatgccctggtcaccggcaccgtggttctcgaggttgccgtggtcgagaccctgggcgatgtcgggcgactgctgctcgatagcgacaagaacgttgcacgtcttgtagtcaaagcccttgtcggacgagtcgtagccaatctgcttgatcgcgccacggacaacggcctggaagtcgacctgggccttggtcgtgatctcaccgaagaccatgatcatgctggaggaaagggagcaacgtgcgtcggaagcgatgaaaaaaaggcaagacgatcagcccccggcacgacgcagcatgacatcgacggcgccgatagacgtcgaacgaacccggtcttggcagcagtctcgcaagcgaccttggaccaggggtcctgggccaggcaggcgtcgagctgtgatgcacggaagaacggggaggagggaagaaaaacacgccggccgaacaagaaagcatcaagcggtcagcagcgagcggcggacgagagccctgaacccttgagtcgcctcgaaaaggctcggggacgcacgatagcgtcagaaacagcctgtagagagaaggaaggggatgggtcagcaaggaaggcgcttgttttgaatgctggtccggcccagtcgcgcgctcttggacgcgcgcgaaaaggaaggaaggaaggacacgcacgtcgcagatcttgtcagggtggccctctccgaccgactcggacgtgaagaggaagctggatcaagacaggacgaggacagtctgtcagtctttccatccctttttgcagggctggtatgaggacagggacaggaagcagcccagtcgcccgactcgaggaaccgggcgccttcgcagctcatccgagcccaagagagggtgtcggaacgcactggccagcgggaagcttggactggacggcagcggatccgttcgacatttttgggagaagaggtaggggaaagagagggagggacgggaggacgggtgaagggttgagggaactggcggggtgagctggcgagcgcggccgcggacggcgtgagccgacttttcgacagcgagctcgcctttccggggtctccgtaacgccaggttcaaccgggcccatgctggttcgggtcgggcggtcggtcgcgagtcgtcggtcgagggcacggtcacagtagtcagggaagtctatcgacaggagggtgaccgctgtctaggagagcaagcaagggagacgctcgatggctggtcgcccaaccgggcctgtcgcccgaatacgtccttgctcaagcaatcatcaggtcattcaccgccgacgcttgcgcttcttgaccggcgtcagctcctcttcgctctcctcgctctcttcactctcctcttcttcctcatcctcctcttcttcctcctcgtcggccacctcatcctcgtcctcggttcccgtaagcgagctcccgctgtcgccgacgagttcccgcccgcgcttcgtgcctctccctgtctcaccgctgccgccgccagcagagggcgttaccgtcgctgccgtcgacggcccgccgccgccgtcatcaggcgacggatccgaagcgggcgagcgcgaagcggccgagtggagccggcgggcgtcgacgaggtcgtcaaacgcgcccgtcaggggcaggtggaacgtcgttgacgccgctgagtcctcgtctggtcgaaaagccgctgatgtcgacgagccgggcggtgaggggaagggaggagtgatctgccagtagcgcacgtggacggccaagtcagtctcgagcttgtcggcgacaatcgatgacatggggcaagtagcagggcgacacgcacgtcgccgttcaaccgctccatatcccacatcgatctcagcttctcccagacctcggcaccttcgacgccgtcagacgagcctccgacgccgccgctggcgttgtcggcgagctcgacgagctggccattgacgagcgtgaggagggctgccatctcaaagtgcctgctgaggccgagcggccggtgcttggctagcgccttgaggaggatctgcgtcggcaagagtcaagttgagacagagtatcagcagacgtcgtctctgccggtgcagctcggcaggagccgagagggacaagcacgcacgatctcgccctggaccgaatcgagcacgcctgccgccgccggtgtagaggccgagccgtcgcgctcttcaggcgccgtcgagccctcagcattctcctcctgctgcggccgctgctcgtcctcggtttcgtcctcgccagagacggccgactcctccttggccgcgacggccttcgctgccgctgctttacgtccgcgggccgtcgccttcttgacggccatatcgagctggatgggattggtagccaggagtatgagcgagcttgccgagctggatcgtgaggtcttgtcaggtggcgagcttgaggatagggcgagatggcgggatggcgaggtgactgtcaggagtgcggcaggggccaagggcgagccaaaggggccgacgtcggctcgcaccgaaccgccatccgtcctcttgagcctttactgctctctcaacctctctcgcacgtcccagcaacgtcaagccgcctcatggagggtatcaggacggccaaggtctgtctcctccgtgttgggaggacggcgagccgacgctgaccgaggtccatcacgtctgcgcgcgcagatcgagcaggtcgggctcgagcgagatggccggcggacgacgggcacgctctacctcacgccgttccacctcgtcttccaggcgcagggcgaggaggactaccaggtgggcatgctttcggcgactaacgtgaccttcgagctgtgagaaatcgagggcgactaggctgactctgcgcgctatcggcccagctcgcctatccgctcctcaacctcgtcactcggctcgcccagacgttcgcgggcgaggttccgctcgcgctgaggacgcggacgtttgagtttccgacgctcttcttccggaccgagcacgactgtgccgacgctttcgagacggtcaaggagctcaccgtcctacgtgcgtccgctcgagctgctcatccgaggaggctgcagtatcggagagcaggctcgctctcaccgaccgctcgttccctgacatactcattgcggcgctcctcctaatggctcagcatccgtcgagaagctctatgcgttcgcttaccacccagacccacccttgccaacgccggccgtccccggctgggcgtgctacagcccccgcgacgagtacgctcgcatgggcgtcggcacgcggaccaaggcctggcgactgaccgacatcaacaaagactatgctgtgcgtgctgagaggcgttcttctggtggtcctctagatggcaagagctaacacccgttcggtcgccgcgcccgacccagttctcgccgacgtacccggccaagctcgtcgtgccggccaagatcggtgacgccgtgctcgcctacgcctccaagtaccgcagcaaggagcgcgtgccggcgctcacctacctccactgggctaatttcgtgcgttgaactacgcgtgcgacgagttcgcatcggctgacaatcttttctctgcgtacccaggcgacgatcacccgctgctcgcagccgatggtcggcctcaagcaggcccgctcggtccaggacgagaagctcgtcgagaccattttccaaacgcacctgtttccgacctcggcctactcgccgtcggcccccgccgtctttggcgcgacgccgaccaacctcatcgtcgacgcccggccgacgacgaatgccatggccaacgtcgcaaagggcgccggatctgagaacatggaaaactacaagtcaggcaagaaggtctacctcggtgcgtcccctcgctcgctcgtgcatgcgctcccaggtttggctcctgacctccagtcgaccgtcctttgtcaggcatcgacaacatccacgtgcgccgagcgacctccctctcctactttgccgacctcttctgaccctgagtctttacccgcaggtcatgcgcgactcgctcaaccgcgtcatcgatgcgctgcgcgactcggagcggatccctggaagcgaggttgcgccgccgccgctcgaccgccaggcgctgcgccggtccggctggctcaagcacctgacggccatccttgagggcgcgacgctgatgatccgcaacattcacgttaacgcctcgcacgtcctcgtccactgctcggatggctgggaccgaactgcccagctcgcggccgtcgccgagctctgcctcgacccgtactaccggacgatggccggcttccaggtgctcgtcgagaaggactttgtcagctttggccacaagttcctcgaccggtccggccacctctcgtccgacaagtttttccacactagccaggcggacggcagcaaggatggcggcggcggcggcgaaggtggcagcgggcaaggctttgaaaccgacagcggcccgaccgctgcgccgagcggagcgcaggccttcttcgcttcggtccagaagcagttttcgggcgcgatggcgtctacctcgcatcttaaggagacgtcgcccgtcttccaccagttcctcgactgcgtctaccagcttctcgttcagcatccggccaggttcgagttcaacgagctctacctccgctcgctctttgagcacctctacagctgccaattcggcaccttcctcttcaactcggagcgcgaccgccggacgccgcccgactttgggccgagaggctcgcgtgcgccttgggagcggacggtcagcgcctgggactggtccagctcgccggctgaggcggaccggttccgcaacccagcctacgacaggtcgctcgacgagcgcgagagtcgcgcagccggcgccgacatgggcgtcctcttcccgaacccgcgcaacgttaagttctggcacgagctcttccgacgcggggacgaggagatgaacggccggccgttgccgccgtcagtggagccgccatcgccgccgccggctgaacagggcgcatccgacccggtcgtccagcacgccgtccagggcaccgaggcgctcgagcacggccggccgacggaggagggctcgttcctgaccgcctcaatcccttacgaggcgcgctctcggtctgcgcacgagaccggctcggcgtcgcccgtcgacggcctccgctcatccaccggggccagcgacgaagcctaccggcctttcacttcgacctcgtctgccttctcgctccagccgagtagtggaccgccaccgccgtcgtcctccgcgccgtcttctttggtgccatcgcggtctctgctctcgccgtcgccgtcacacgacgtcgggcgctcgacgtcaattgcctcgccagctcagtcgtcgtcgaggactctgtcgccgtcagcagcctcgggctcttcctggggtgcctcctgggcgtcgctctcgacaggagcgatctcggccttaagcggcgcggccaaggaagtcggtcgtgcagcgagcaccatcagcgcccaggcgcaagctgctgctgccgcacgcgcaggcggcggcgtctcgcccggcaacggcggtggctggcgacgagaagacgagatgacgtcggcaatgggcagatcctcgatagcgtcgtcgtcctcaaccagggccatccctgcggtgtccagtcacaatccctgggctttggtggacgacgcgccctcgtcgcacctgacctcgacctcgccgccacgagcgatcccttcgccgacacctcgaggcggcgtctcgaaggaggagggcgatcagccgatccggccgagcctctcgtccttcggagcctcaagcgtcagccagcagtggagcttcatcgagccgccgtcgacgctcgtggcgagctcacgcctcggccaggccagttacgaacggccgaacggctctgcgtcgtcctcgttcggcatgccgagcgccggacagaaggcctggcgagggctcgaagagctcagcatcgacgacgtcaagggcagcggcgccagcagcggccagtttccgaagcgcgaggtccgccgcaacaatccgacgagcagcagttcaacttcagatccccggccgccgccgccgccgccgatgtcatcgtcagcagccgacgacactgcgatatcggccaagccgccacaaccgccgccatcgcaagcggccgcgtcgtttgatccgctcggcgtcggcctatgacccatcggccgatgggatgctccgtcatagtcagcgggctcgctgccagaccagtcaaagcggggtgcatggtcggtcgatgagagatagtgcgggggtgccggcaagcgggcgtggaaagcgtgcgaggagtacagagcttgctggagagagtcgtgcaaggatgggagaaagacggtatgcgggtgggttggggtcgtagagcgttgataggaatagagcgaaaggagcgagggtcagcgcaggagccggtcctgcatctcctgcgtaaccaccgccatcgttccggcgaggaggcgttggatttggacgaggtcggcgttcgacaaggcgtcgacgttggcgagggtgggaccggccgtctggagcagtgcgagcagctccgagggctcggccgacgtcgacgacgggggagcgacggcgtggccgttgagacctttggaagcctgcgagaaatgcgatggggcctggctgttgctcaaggtgcgcttccggtcggccaagggcgagatgtgggtagagatgtcatctggtgaaggatgcggaggcgtcagcagtcgctcccttgtcgagtgactggcaagcagccgacggtaacgcaccgctgacaggctcaacgatgagcgtctcggcgacagccggctgcgagacgctctgcgacagggccggctcggcttcctggccagcgaccgacgacgtcttaggctcggcgtccgagtccgagtcgaccatttcggccgaaatgagcggcgctcggccgttgcctggatcggtcaacgagacgctagtgtcgggccgagggagcgagtcgtgcagtcggcctgttccgagaaagccgcccagatgtcagcaagtggcgtcgacaaggattagaaacagagtgcaagacgtacggcgttcgacctgccggttggagcggcgagccgattttggcgtgccaggcgtgtcgtaaggctcggtcgagcgattcgctgatagtgcaacggatgaagtcggggatcagctgacaaggggcttgcggaagcgctttgcggcataaggacgcacccttgtcatccgactctggcacgacggcgtcgtcgtcgtcctcgctggccatcgtcaggtcgatcgacacattttgagcaggcacccggggcgtaaataggtcatcgagcccgtcgactgctgatggccaggctgtcgacccgccgtgagccttgctgcggatgacgagtgtcctctcggagcgctccttctggagtcgatgccaggtcgccgatcccttgtccggcgatgagtggaccgagacgtcaagctcaccgtcgaccgtctcctcctcatcagcttgcagggccggcgagccaaagaagcgcgggatccaggacgaaacggccgagacgagaccaccggatgaggccgatttggtgagcgaccgccgaggcgtgttggccttcttgcgcgccggcgtcgggaaggctttggcagcgggcggaggcgcctgcgccggaggctccatctcgatgatgtcctggatgtcggcctcgtcggcggcgtcctcgaacggctgagtcggcgtcgccgggacggtcaattcctcactgttggcccgacgccgcttcgacgaccgaggcagggaccgaggggccgagggctgtcgccggcgcttcttggtcggcgtcgcccgggccttgtcggcctccccagtctcgggcagagttgcgggaactgcctcgtctggcgctgcgacgacgagcgtctcgccgaaggtagccccctcgtgggctggaggtgccaactcgacggcgagcgtcgggagcgcagaaggctgcgtctgctcttcctcgggcttgagcggggaggtcgacgaggtgtcggcatcgtacgccgactcggcggcgctgcggcccgaggcctcgatcgagctggcatcatcgttctcgttcatgaggtcgtcggaagccggcggtagcttggcctgcggctgcgttgcttcgatccgagggagcggcaggagggagcactcgaggccgaccgtctcgacgcccatgttgagctcgcgaaggccctttagaagcacctcgacgtcgggagggtacgagaggaccttggcgccgacgaacgtcgaggcccacatctcgcggaaggcgagaacaaatcgctcgttgggcgcctgcattgaggcggtgaagaggttgccgaagcggtggagcgagtcgattgtcggcggcatgacgaggtactgactgccctcgggcgtcgtcgctttgatcgcaagcttccgaaggaccagctggtagacgtcaaagacctgcaaggcgagtcgggagtaacgtgagcggaagggacgctaaaggaagtcccgcgcataaatgagctggacgcacgacctcgatgtgcacgtcaccctgcaggacttgatgctcgtccttaacccagacgctgagcgccggggtcagcgcaccaacggcggcggcaacgtagccgagcgggaggcccgtcaggaacgcgcccgtgctccggagcaggtcgatcgccgagccgagcatctcggggtggtggaggacggtcgggtaggccttgtcaagcgcgagcgcaagcagctcgaggaagccttctggaaagtacttcatgaagcgccgggcggcgagctgcgagtcattggtcggttcgtggtcgcccgggtactcgaccgacagggcgatgaagcgaagacagtcaaaggtcgcctggcacggactgcaagaaggggtaaactgtcagcaccttggagggcctgcagaccggcagagacgcacatgtcgaccatgtcgacgtcggtcaaaccggcggcaaggtcctcgacgacgacaatgttagggttcatgcccttggagacggcacgcttgacggtcgtctcgaggagcgtgccccaggtggcgacatgttctgccgatgccgacgtccagaggacggggaaccgccggaacgggtcggtcaggaggtcggtcaaaagccggagcgtcatcgagtgggccgagtccatgtcggcatcggatgagggcacgccggcagcggcggcggcggcggcggaatggctgctgacattgacgttgagcgacgcagtcgccgtgctcggataaagctcaatccacttctcggctggtgcaaggcggcagggagcatcagtagagagcaggctgatttggcttcgccgcagctcgactcacccatcatcttccagagggcaaagcggaccgcctcctcttcatcatcctcgcctggcgcgagcttatcgaggttgctcgtcaggtctccgagcaggttgaacgcaagcgggccctggagaccggcgtcgacgagccgctggagcgtcgcgataaaggccttgcgcatcgtcggctcgacattgagcggcggcagggtggtcccgatcagcttcgtgatgagaatccctgggtcgcgtacggccgagacgagcgttagcaaggccctcacaccgtgaccaaggcaagagggctgagcgcacctgcgagcgttggtgcgccacctttgccagcaccgaggaccatgtccttcgtcggcatgagcatggtcccaaaggcctcctggccgagaacgtcgagcgcaaggccaaccaggtggtccatcagcccataccgtacgaggtcgaggttagcctcggtctccatcgacggcggccggtaggccatgacgtcgagcttgaagagtgtgccgatcagggcggcgacggcggcaaggccggtctggtactcgtgcgacggcctcgcgcccactagcagagaaggtatacaagaaaggaacgtcagcgagtttgcgtgcagcgagtgaccgcaaggtagacgcaccagccggcttgagcgagtcgagcgcctcgaggacgcctcggtacgccgtcgagatcaaagctggcaggacgcggacgctctcggcgctcgtcacccacccctcagacccgacagcatcgacgtccctgagcccccgggtgccgacgaccgccacacgcacgaggtcaaacgacgacccgagatggcgcgcgacccacgcctgcggccagggcgggatgtcgactggcgaggtacccgcggccgacgcactcgcgcagagcatgccgaggacccgctggcggtcggtcgagccggtcgggaagtcggcagcggcgatcgagccgttgaggaagcccgggcagagcaggcggtcgagccgccactggctggtccctccctccggttcgaccggacctgcgccgccgaggacgcgaacgaggatgcgccaaccggcaagcttgatgctgtcgaaggcgacgatcggcagcaggtgattgacgagcagcggctggacaagcgagtccatcagcgtcaacaggtggcctagttggacctcgtcgaccgaatcggccgggaggtcgccagcgtcgttgtcgtcctcgtcgtcgacggccatgctcgaactccgatcgtcgctgccgtcgtcggccggggttgtagggacgaagattcgaccctgaccagcctgatgaggcgtcgccatcagaccgggcgagacgatcgctggccggccggccgactcaacagacggcggagtcgaacctgctggagcgaccgcccgctcgctaaggatcgcgcccgagaacgcatagacggcattgacaagcccggtcgtcgcggccagcatcgcttcctgccgtgagcgcgcgagcgccgcgcttgccgttccatttagcgcggcatcggttcggctcgcccagaccttgccggcccctctggcagaagtggcggctgtggatggtgcgtggaggaggcctggggcgatgtcgcgcgcgaaagcgctgtggaggttggtgtagatgaggaaggtcctttttggtgcgagaatccagggcaagtcgaacaggaccgggtcggccgactcgacggtcgctgctgctgctgcggccagtcctggctgacccggttccgagttggctgaggacgaggcccggcgggatgactgggagatgatgccgtggaggacgtgatcccacgctttctgaacgagcggcgccatccctgggatcccactcccgttgctggccggcgtcttggcgcctgcaagcccgcctctttcgccagcggcggccgtcccgcggacgacgttcatgaactcgagcagatccgagacgtttgtctggatgttgcgcccgaggagggtgatgacgacagcccaggtggcgagtgcccatggcgccggcggatggctgctgccgctcgtgctggccgtgtagctcgctcggaaggtcgcgagtagctggaggacgagcttatcttccctgacgctcgagccggtcggagacgacttcttcgagagggccttgacggccgagagggcgacttcctcctcgactaccttgcgcgccctcccgagctcctctccgccgacggaagcggcttggtcaagccagctccgaccgccaaggaggaccgacccgagcgcggcgctcgctcgaacctggatcgtcggctttgggtcgagcaggagccgcaggagcggggggaggagtgtccggtggagcgggagcagtacgtctgggttcgaccggatgagcgagctcagcgtcgcgagacactcgagcttgactttgagaggcgtctcggccggcgctgctgctgctgctgtcgcggcggtcgagacggcagccgacggcttcttgagcgaggtcgacgtcgtcgggtttgcgagcggcttcaaaaaggcatcgagcagctcgacggcgagcggcccgagcacgcgcgacggcaggctcagctgcgagagggcgtgaagcgtgaaggtgatggtccgcttcgaggctgtgggcgcgacggaggactgggggctgacggcagaggcggggagcgggaggcggaggaggaggacgaggatacgccggaggtcgtcctctgcgtggaggggagaggacgacggtcagcgagtcaattgccgatgggagaaaaagagagatcgcaccatcaaagcaactccaaagtgcgtcgttcgccagcagcgcgccgatgagccggattgccccgtggccagcttggacctcctccctccggcgcgtcacctcgagctcggtaaagcccttgcggagccgaccggcgccgcccacggtactgttgtcgccggccggagacgactcgcgcgagcttcgtgtcccatttgctttcccacccgccgtcgtctttgcctcgtcgtcgaccgacggagtcgggctcgccgaggctgacgcgccactgaagaagcgccctaggtcgcggacgagcgcgttagcgagtgcgcctgcgcgcgggtggagggcgtcgacggtcgactgaagggcgagcgtttgagacggcccttgggggattgctttgcccttggcggtcaataagctgtgtttcgggctatgggaggggatgctgccgccggaagcggtcgccgtcgccagaggaggcgttgcagggagcgaccggaagcggcttatgagcgccgagtacgactcgacgacgtccgggagcgagacgggtacaactgccttgccattctcgctgctgtaagaggcgccgcaggcaaggatcgtccggaggtgggtgacgatcgactgggtgccgtcgtcggcggcttgcgcgtcctcaacaggagtggcagcagcggcggcggcacgagtggctgctgtcgtcgagctctcggcgacggcagtcgacgagcctgaggatgcacccgagcggtcggtccgagagttggaccggccgttcgtctgccctccccctgccgctgctggtcgatcatcgctcctcgacctcactccagcaccaaacagccttgacgtccctcccgccgccgttaccactcctccttcctccttttcacctgctcctccgccgccgccggtcgataagagcgacgcgctccggagacggccgttgacccgcgtgccttcctggacgtcgcgcgcgcgccggatctcggcagagcccgtgcgcttgagaatgccgcgctgaggcggcggaggggacgagcctccagctgatgctgctgtcggcgtagacggaccggcacgggacgaaggaccgccgctttcgccgtcggcgaagagcttcgcaggccagccgaacgtgccctgcggcgccggcgccggcgcctgctgtccgcccggcgagtccgagctggcgccggtcgcctgctgctggagcgcggcgagccgtgtctgccgggcgctcgccgagggcgcataaggatggagcgagggcgggtgaggcgagaagacgacttgtcggcgaccggacgacgacttgcgtcgggccgaggtgctggcggctgagggcagctcgaggtcggggtccgtcgtcgtcgtcgagccggccggacgagccgctgctgtcatcgctccggctactcctgccgtcgttgctgagggtgacgagcccaggcccatgaccgccgccgatgtcgccgctgacgaggccgggctactgctcgaggcagcggccagggcggcggcagcggacgagcgcgtgggcggcatcgcggctgggcagaggaggacgagggcgccagtcacgtccgagggtgtgagaaagagccaaagcgggctggctgatggaaggacgtttcagggcccggtcctgagccgagtacagaagctggccggggcgtgagtgtgttgtcgtggctggcggtcggcagctcgaggacggcggttggtgcgcgtcgcgcttcgacgcgtcgaagcccttggctgcaggacgagcaggcagacaggtcctcttgcattcagcaatcgcctgaacagctccctttgctcgaatgcaacccgcacgcctcgcttggtccaaccagtctctcgctatcgcaccgtcctccgctcgaggtcctggcaggaggcactggtggctcgaccgaggtgtgcgcgcagcagcccctcaagagagccagcgccatttcgacctgccgcgtgtatttgtacacacaattcataccttgcccaatcaattctcgcgaacggcggacccctctagtgagtatccaggctgcagtctcaaaacgataggtctaatctcagagaagggttcaactctgttaggcacgatcgacctaaagatttgagagcttcttcgcccgacggtcaagcatgctgatttgctcaagctcgcgcactggcggtccagcatggctctgggtatccgcaggagcatgctggcagcccgcagctcgagatctctcataaaggcagagaaggtgcgtcggtgcgtaggtgcctttagtctgcataaatgcatcggctggacctgaccaaacgaatttgccatccggtcgttcgattccgagcgtaagagctgtcacggcggtgcgtaactctcgctcttcgtttcgatccccctcgtccgatggagccgaccaagtcggaatggcccaccgagtcttcctttctctactaccaccaccttccttcttctcgccaaccatggagttcctctcgcaggtcatccacaatacgacggtcccggcccacctcgtcgaggcctcggcctcgagcccgctctacagctcgatcgactttaccagcctcaacgtcttcgagcagctctggggtccgtcgcgtcctcgctcgctcttattatggtcggccgctctctcgctcgctcaaaggctgacctcttcttgctcgactcgctcgacagctcgctggtacatgtgggtcggcaaccccgtcctggcgaccggcatcgtctcctttgtcctccacgaggtgcgtcccaactgcgaatgggagtcggagcgtgttgccaccgcgcgctcgctccccaaggcctcggttctcgtcccactttcgtcctcagcatgtcactgaccatccctcgcttcgaccaggtcgtctactttggccggtgcctcccctttgtcatcattgaccgcatctcctacttcaacaagtggaagctccagccaggcaaggtgccgacggccaagcagcagtgggactgcaccaagctcgtcctcctctcgcactttacggtcgagctgccgcaggtgtgtccgcctgttaccctcctttttccctcctcctcaaatatctgaccttactctcgcgtctgccggcagatctggggcttccaccccatggccgagtactttggcatgtcgacccacaccgtcccgttcccggcccttcggacgatcgcctggcaggttgccctctttttcgtctttgaggacaccttccactactttgcccaccggtggctgcacacgcccatgctctacaaggtgcgcctctttttggttctgctgcagttgccgattcgtgcacgcgtgctgacggcccccttcttgtcgcgcctctgcagcacattcacaagctccaccatgagttttcggcccccttcggcctcgcggctgagtacgctcatccgctcgaagttctcatcctcggcaccggcacgatcggcggcccgctcctgatggccctcgcaacgacgcacctgcccgcgtttgtcaacgccggcgtcaaccttcacatcatcaccgtctacatctggatcgttgcccggctcttccaggcggtcgaggctcactcgggctacgacttcccttggggcacgcggcactggctgccgttctggtcaggcgccgagcaccatgactaccaccacatggtgtgcccctccttttctttcgcagccttgttcaccccccgtcgttttgcaggcgctgatcttctcttactgcgcgtcaggcctttgtcaacaactactcgacctcgttccgctggtgggaccacctgctcgggaccgacgacaagtacaacgcctaccgcgcgcgcgtcgcggccgccaaggcatccgagcgggccgccgtcgaagcaaaggagaacgagacgaccgagcgcgagggcatggaggcggagcgggcactactcgcgcgcggcggcgagaggaaggagaagaatgtccggctcggggaggagacgacggccgaggctgaggcgccgaggaacgtccttcggatggccggcgaggccgaggcaaagaagagcaagtaacgttgcgcttctttctctctcttcgcttgcttttgtccttcaatttctttactcccgcgtgcgcattctgcgtcgccggctggaccctagaccccgtccgccctatctctcgctcccttcgtcctctcgcaacgcactctcctcctacctagctcctacatcttgcacctgcacccctcttctttcgtagagcatcttttcttatgactgccctttcccgaataataccatcgacctgcgttagccgtctctccggcggttgattggcgaaggagtgctcatcaatctggcatcgctgagtcgtaaggtatcggaacgtgaaaatcggaagggtggatagaaatcgagtgcggcccagtagaaagtgagaccgcggaggctatggcagggacgtcctttttggcccgtcgaggggcgagtcgtgtcgtgcgcttactcggcgaagttctgagtgggagggcaaagtgagctcggtcagagccgctcctctgcgcacctgccgacgcaggcgaggacgcaccttctcaatctcggacaggaccgtcaggaagtcaaacaggtaagccgagatgcgcgccctcgcgtcgtcgctctcggtcgccggtgtctcgagaaacatggcggcgacgaagcgcgtcttctggaccagtgacggcccgttgacggcgagtgactgcatcgggatagagtgaagcgtgttgagcaggtcgacggcgatgacctcgcgcgagtcgttggagccctcaaggttgagcgacatgcgctcggccgctgcggtgggtgtcacacaagtgccagtcagagtttgggcccgacaagcgagcgctcgagtgcacgcacctgtccgcgaaggcgttccgggtggaccgctgaggttaagcagctcctcgcggtagccgacgaggacgaagcggacccaggccatcgtgacgtgcaggttgccttggcagacctgataggcgtctttggcgtcaaactggttcggtgtggggttggaaaagtagtcgtggagctgttccatcgcagcctcgttccagccggcggcgggtctgcaaaggagggaggctcgaaagatcagtcaaagcaaggaaaatgcggcggagccgaaagcgacgggacagacgagttgcgtgcagagtcaaagtgcaggcggggccggaaggccggcggagcctccgagatgatcgccgaggcggtcgcaaacatgccgctgacctctcgcaacttgctgacgataacggaggctgagggcgacatcggaaccgacaatagattgctgtcagtaatcatcggggaggagggcgatgcagtcaagtcgaaacgacgtacgctcaatcggccgcggcagccgtcggaccgcccgctgcgtttcgataatcgtgccgaggaggctagcgaaagggcggagagagggagccgtcagatcagagtccccgggatgacgtcgcccgagaattgaggacgtacgcaaaggttcgcgtgctcaggttgaagccaataatgagcggcgttttaccggccggctgcggcaggacctcgtctcgggtcaggcactcgtcgtcgacctcaagcggcagtgcgaccgccgccatgtcctctcggcgtaagctgatgactcggccaagcaggcaggccctgatcacatcgcaatctgcaggtcagcaagcgttcgacgacgttcttcaagctgtgacaggacgcacatcgacttgtccgcgtcaaagagcaagaagaagatgcgccgcgccatctcacgctcgatacgatctacgggagggatgaaaagagtcagcaacaaggctgcgccgctcgagctgagggcggtcactgaccgagttttgcataggactacattgcgcgaaagcgtgacacggcgactcgtcagtgtctgagcgacgctgagctctgggagtcaacgagagacgcacgctctcctcgttgaggccgagctgaatagcaatctcgagcgactcaacgtaagaagtagctgaaagggagagaccggctcgagttagcggcggcaagcgtttgcaagatgaggcacagtcgagatcagacgtactgttggagccaccgttgcccattactgcaagccgtcggaagcaggtcagccagacagaaggcagctgaacgtgtagcaaagccgcgcaccataatctgaggggatcggacaatggcgtcagcaacaggatcatgtggaaagaccgataggtccaagacgcacggtagatcgtgtcgaagtagcggatgatgaccatcgggaaagcaggcgggtcgctgggtcattgtcgagaaagcgtcagtgaaacgacctaagcaggtccagagagtctgacaggtcggagagaggaccgactagaagtgctggctaacgctgcgcgaggcgcgaaagcactttgaagcgagcggccggacctcggcggccgggacggggatctgaatcttgggcacctggagcagcgtgctcgcgagcgtgctcatgacgagcgcgaaaaatagcgggtccgtctcttcgcgtcgcatggcgaggtcggcgaggaacgtcggcttgtgcagggccggcgtcaggacccagacctgtggacacaaggagagaccgtcaggcggtcggcaggaaggcagagggagagctgctgaacgacgcacaaagtcaaagaagagcgagataacgtagatggcaatgtcgcgcgggaggacgtcctcgatccgatgccggcgcgacgtgccgtcactgtaaagcgagagactcgggctttcgacctcgctgctcaccccggcgtcgaccgagccgccccttgcaggcccgccgcctgcgccgttatggcctgctgctgaggtcgagcggccgctcgggccaccaccgccgtcgacccgctgctgcgactcgagcagcgacgtcgcctccatccaatgtgagacagtcgcgcttcgctcgtccgagacgagcgggtggtagccgtgcgtgtgtggcgcggagagatggagcggcgggctggcacctgccggcgaggggtgcgcgtgcgagagaccgccgccgccgtttggcgagggcgcggcgaacgccggagagtgacctgcgccgccgaaggccggcgacgagacgcctccgtggacgaaggacggcgagtggccgtggttgcttccaaagcccggcgagccgatatcgaccgtttggatcggtccactcccgccccccccgccgccgctgttcgtgtcgcccggcgagccgaagtcggacgtccggacgagcgagggcaggaccgggcgggcgacgccgtcgtacgcggccgagagcgaggtgctgctccgcgagggcagcgtcggccgcatcgccccggaggaggcgatcgcgaatggcgaaacaggcggcgagggctctattggtggaagagtcagggcattaaaggtcgagctcccaatggcgctgccgccgttaccgagtgacgccgtcgtcgggaaggaagaaaagaggcgattcggattcgggtaggcgtagagcgaggtcgccgtctcggccccgctcggaggcggggagagccagctgggaccagcacctccgtgcccattgccgccattcgggccaaagggcatgctcagcgggtcgaggtcctgctcgagcttgaacggcgtcgcaggcgcacctgctgctgctgcggtccccgccgccgcgccggcaagcgcgggcgagagcgacgactcgccgcccgagccggctgccgacccaccgaggcgcgatggtcctcctcctccgccattccggtcctcgccgttcgtcggcggcgctccttccaagccggccagcctctgctgttcctggaggcgtctgggcaaagggaggcgttcggaatgaggaccatcagctcccgccgtgatcggcggccgctggcccggtcaaagactcacttgaggtattgattcggcggcccgcgcttctttgggacgtaggcgtacgtgcacttgatctcgaggctcgcgcagtgctggcaacgaggaaagaaaatcaggccggagcttgccgtgaaagaaaatcacgtctcggagaggggggaccgacctggcactgcgggacgctcgggcccttgacgtcgaagccgtctggcagcggctcgtcccgatggcacttgactctggagcgctcgacagatagtcagctcgccttccctgcacaagggaaagggcgtgctcacttgcgggcccggcaggcgtcgcatgagatggcctgcttcttcttggccccggcaccggcgccgcctacgcttgactcggcctcggcagcagcagcggccggctcgtctttgcgggccttcttcttgcgcttcctcgacgacgccgacgccggctcgtcctcggcggcgtccatgtcggcgtcgtcgtcggctgctgctggaagccggtcggcggttgtcgacggtccggctgctgctgcagcagcagcaggcagcgtcgtggcggccatctcggtcgaggcggagcgacctcggaggcgggagctgagagaactgagctgggcaggcgacgctagacgaggtcgatgaccggtgctcgaggcgagtgggcgatggtgctggtactgctggtgctgctggtgctgctggcgaaggctgccctgacttgtctgctgctcgacggtcgggcggagagttcggggaacggagaagaggcgctcgtgcgaaggggcgcagagggaccgggttcgccctcagccgcgcagcccgggccggagactcgaaagctgtccgacgcatacgagagaaggcttcctttcgaggagaagactgtccttcaggacagcgttcagtgttgcacgctcagagagtctgcagtcgtcatcaacatcttcgtctgcccctcacgcgcttgggctcccgctgccgctcccctcgccgccgccgccgctggcgtccttgtccatcttgggccgcttgatgacgcccttgttgagccggccgaggagggtcgagttctgggcgtcgacctcttcgctcgtccggacgcgcttggtgcctcccccaccaccaggcgaggacgcggtcgcttgcgtgagggctggagaagaaggacgggaggacgggaggtcagtcagtgcgtcgatcagacagagacaagagagccagactggcaagacggaccaccgctgatgagactcctcgaaggaggaggcgtgccttcgcctccagcgccagccgccttggccgcagcggctgtcgcccgagtcgcaggcgatccagcggccgccgccgctcccctcccgcgcggcgtgccacgagcgcctcgaccacgcccggcgccacggatcgacgtgcctgatccttcggctgccgccgctggcatagaggctgccgcgccggccgcaggagtggtggcagatttcgagagcaggccgtcgcccgaggccgcgttcgcggccgtcgccttgatgcgcgtcgccggcccgcctgccgacgagacggacgcggttcgcttcggtgcgggcgtcgcaacagcagcgcccggcgtcgaggccactgccgcacccgctttcggcagggccgcgaccttggccgtcggcgacgtctttggcgtcccgcccgccttgagcgcgtcgagctcggccttgagcgcctttgcctcagcctcggccttgtccttcttcttccgagcggcctcgagcgccatcttctgcgcagccgctcgcgacgtcgcctcggacgtcaccttggcgacggcggcagcgacagcttcagtgacggccgcctcggtctcctccttcgacgatccggtcgagccgcccgcggacgatgcggcagccttgagcgcctcggcgtgggcagacgcaagctcagcctcgcgcttggcaacggcagccttgacggtagcgtcgacgtcgacggccggcgtcgacgacgccttttccgttgcctcggcaacagcagccttgactgcgctctcgagctccgtcttgagctccatctcgcggatcaacagcgccgcatcgtgctcggccttgagctcgtccgtcttgcctgcaagcgcagccttgacggccgcatcgaccgcctcagccgacggcgcagcgccgccgtccgtgtccattgcggtcgacgagctcgcgagctcctcgcggagccgccgctcgcgctcggccagagtggtcgcgtgctcagccttgaggtgagcgacggccgagtggaccgccgccttgacaacctcgtccgaggcaggcgcgaccgtcgccggcgagccgtcctcgttggccgccggaatggctaatgaagcagcagcagcagcggccttctcggcggcctctgcccgagcggtgatcgactcgatgtcccgcttcagctgattcatctcggcccggtacctcttgttatcgttgaagatgttttgcgagcgggcgcgctcagaggccgtgtacttgaccttgtcggtctcggcagtggtgacggccgttgcgagctgggccttcagcgcctcaagctcggacgtgagcgtcttctgcagaggtgaagcgcgtcagctcactcaggactgagcgacaagcctgatggcgaacgcacgacggcctcttcggatccggtaccggctgcagcggacgcaatagcctcgtccttggccttctggagctcgtcacgctccttctgcagcgcgaggtatgcgtccgaggacgtgaccgcggcctcgagcacctcggcggtcggcgtcgccgcagcagatgccccctgcgcagcagcagcctcggccagacgagtctcggtctcggccagtcgggtctcgagcgtcgtgagctgggcgcggagctcagtctccttgacagtccaatccttctgctgctggaagaagcgtttctagcgaggttgaaacgccgatgaggcgcaggcgatcagtccggacgtctttcgcgcgagaaggttaagagggacgtacgttatcggtaaagatcttctcgctccgcttgcgctcggcgccgatgtagcgcgtcttctcctcctcgaagcccgtccgagcagttgcaagctgttgttcggcggcagccttctccgcagaagcgcgttcctgcgggcgccacgaagaagatgagagtcagctgtttgaccggcacgttcggatagccggctggaatgggcggcgtacggctgcttccgtcgaggatgcaagagcgaccctggcctggtcgcgctcggcctcaagagtggtagcgctggccgccttggcggagacatctccaagctctttgcgcaggtcatcgctgaggacagaagtggcgggtcagcttcctgttacgctgcaaccggcaggcccgcgatgaacgcaccgctcgacctgaaggttgctgatcgtctgcagtgcggtccggcgagtctcctcctgaacccggagcgtttcggcttcggctcggcgcaagctctcgatgagcgactggaggcctgcgcggtccttagcgacctcggcgacgtccttctcgagcttctcctcggtcgcccgccagagctccttctcggcccgcaagttggcggcctccatccgcgcccgctcggcgtgaccctcgacctcgatccgcttctcctcggcctggcggagctccatgttgacgcgcatgaggtccgtcttgacgccctgactttgcgtgacgagcccgtcaaactggatcttttgcaggttgccggcctcggtcagggcggtaattcggtccttgaggtagtcacgctcggcctcgacccggacgagggcgatgtttgccgtattgacctccttgcgggcctcggcaagctcggtccggagccgctcggcgtcgagaccaagttcggcccggaagctctcgaggttgcgcttgacaacgtcgagcagtgcgccgccgctcccggcgccggcctcgaggtcgagacctggaggtagggagaggccggcctgggagagcatcttggcaaacaggtcgcgctcgcgcgtctgcttggcaagcgcaatctccttctcctcgaccttggctttgaggccgaggatgatctcgccggcttcgtccatcatcgcgagcgcctcggcatcggtctcgccgtcggcagccccctgtctaggcgccgcgctggtgctgcccgacttctccgccgcctcgagctgcttgccaagctcgcggacgaccttgatgagctgctggttctgggcctggagctccgggatcgagcggaagacgatgaggttgcgggtgatgacgctgtcgatgtcgtcgccctctggctgctccatctcggcgtcgtcgaggtgctggtactgggcgaggaagggctcgtctcggatgccgatctcacggacgagcgagacgacctggcgcgagaggtccgagatgtgcgactcgaggtcgacctgggccgcctggagctgcttgaccttggcggcctcgtcccgaacgcggcgggcctcgatatcccgttccgtcgtaacggacgaaagctgaccagcgagttcgttggcagtcgcgacgaggcgcgtgtactcctggcgctgctggcggagaagcggcgcgcgctcccggatgtcgcgtaggagctcctggagcgcatcctcaagacggcgcgtctcctcctgttgcttactgagctcagttttggtccggacgttgtctacgtagagctccgagatgcccatgccgcgcttgcgcatcagcgagccggccagcgcggccgagggcgagacgagcatcgcgccctggtcggcagagctgtcttccggcagcgcatcgggatcgccgatgatacccgactcgaccagccggtcgaccgtgtcgcgaagctcggccaccttggcctcgagctcggcccgctgctcctcccagacgagacgctcctcgtctgtccggacgtcgctttcctttcgccgggcgaggtcctcctcccactcgcgctcgacctcctcgagccgattgcgggcatcctcggcccggcgctcggccgactgggcaagtcgctgctgcgaggcaatctcctgcttgaatgcagccttctgctcgacgagctgcgtccgcagagtcgagacctcggtatgggaggccgtcagtctgttggcaagctgcgactgcgacgacgtcagctggttgagcgacgcttgtgacgtggcgagcgcggcctggacggtctgcagctcgagactagccgactgagcttgcgattgctgcgaggcgaagagaacgggggacggatcagatcaaggcttcctgcgagccgcggtcgagccaaacgcacggcggtcgagcggtaggtcgcaaagtccgacgtcaatcgcgtgatggaactggtgagtgtggcgttgtccttattggccatcgtgaggttgaggtcgagcgcctcgaccttgaactaggtgtgagagaccggaagtcagcgccgagggcgacatagcgctgatcgtttcaaagcaggcccaccttgaggttccggctctcgactctcctgctctcgacctcgctctcgacctcgcgcacgcggacctcccaccgcgcgaccttgtcgttcgcgctcgagatcgacgattgggcccgcgaccgctcgccctcgagtgcagtgaccgagccctggagggagcggttctgcgcctcgaccgaagagagctgcgttgcgagcagggaggccttggaagcctcgccggcgagcgacgtctggagcgcgttatactgctctcggaggtgcgagagcgattgctctgcaaggcaccgggcgagaaacaaggccgtttagttcagctcgttactctctcactccagcacagagcaagcgtccgatcgagaaggttgacactcaccgaggccgtcttccttgcttttcaactcgaccttgctctgcttctcggcctcgagctggcgctcgagctcggcgacgcgggcgagcgcatcgctcaccgcctgctcgtgctcgatctcctgccggagctgggcagcctgcgcctctccgagctcaagctgaagcgagtgcgccgtcgggtcggaggaggtgggggcggcggcggctgtcgttgacgagcctgcctcggctgacatctcgagagcgagaaggtcgggcggcacgtctcgcgcgggtcggtcggtgaggggcgcggcgacgggatgtcaaggaagttggagaggggcgcctggcgagctctgcttcgcggcgactagatggaggcggattgtagctggccggtgatggctcagggaggttggcggagcagatggagtgggaggagggacggtgaggagggtcgaccggaggtcgaccggggctggcagatgcgtctgtgcaggtctgatgctctgaccttccaaccggcctgagaaggggccgtaccttgcacgctttcactgcctgcacatggggcagacgttgctagctcgcaagagaggcgagcgagactggagctgtgctctcctcagtcgagaagtgtgatcatttgatcaagcgaagacccggacctccttactcctggcggctggaagacagagcggcagaagaaaacgtcagcatcgacggcgcgtcagaagtcccagctctagaacttaggagagcagagacgtaccgggagccggagttcctgtagcgatcccgcacgccgtgctcgcgcaaggtccggcccgcgctagccccgtcctggcccttcggacgcgggtagtcaacccaaaccctgctgttaccgatcttgagttgcccgatgacctccttggcctcagacgcctccttgatgctcctgaatcgaaggaaggcaaacgggtggagggcgcccgtctccttgtagtagccgcggttgagctggaactgcttgccctcgagcagcggctcgatgaccgcctcgaggtcgtcggtctcgacctgcgcgaggttgcccaggtagaggtcggacgcgggcggcgacgcgttggcctccctagcctccttcgcagccgcttgccgcgccttaagagcctcaaggtcctcagcgtagttggcaatgagaggctcgccctcggtaggccggcttgtcaggctgtttatcgcctcggtcgcgacctcgaccgatgggaactcaacgaagccataggccttggggcgaccatcattctgcgtgccgactttggccgagattgcgccgtactccttgcagatgtcgagcagggctgagaagaaggggagcaagagagccagtcagccaagtacccaggcaagccggagagaggcgcgcttagagactgaccgtctccgtcggtgccggaaggaagagtgccgacgaacaaacgcttcgatggcgggtgctccttgcgcggaccccggccgggccgggcatggcggctcgagctctcgtcgctgaacaggcggaggccggtcggccaggcgaggacggccgagcggaggatcgacgccggccgggcgacctggcggacgacgacgggcgaaagcgtggtccgcgacaggaccgggacggcagagcggagagtgcgcgagaacatgtttaggtattggttggaaggggtctggtggaagagagaagtcagagggccgccgacgagtaatgcgagcaggggaggaggccccgcggtccaagccagacgcatgacaatggcggagcgccggcgaccgtgctggacgacttggcttcctctttcactttcgatcatgcgagacacgttctacaacattcaaagcggtgcgtgcgagagtacaggagcgacgcgtagcaaagcaaaaatcaaacggatgccgcggtcacggccgcagggtcggttcgcagatggggggcgacggcggtggcgcagattctaccgagtcgccgatggacgagtgcaccgacgattggcgacttccttcgtatgcgagcgtcccgagggcgacgaggtcggccgagccggtgctcgcccgcgagtcgatgcgggacttgtcgatagacagcgctcgatctctcgggcggtcgtcgtcgtcgccgccgacgtcgtcctcgtccgatccggaggcgaggtcgtcgtcttcgaacgacatcctcgagccgctcggtaaaggacggacatgcgccaatgggcgacctgtgccagtagggacattgccgtcggcggaggccgacaaggcctggccgctgaacgaatgctggccgggcgtcatcgatttggtgaagcggacgatcgccgcctcctcgcgcttctcattgtcgcgactcgagtgatggcgctcggattgtgacgtcgcaaagaagaggactgcagagagaccgagcttcagaagctagcctgtgacgctgctagatgcgctgagatcgggaagacttactccagctgttgaccacgacgtcagtgccgcaggaaatcatgcagacccaagagagctcaagcgggtggacgaagaggatgattgcctgcggagggacgggacgaaagtgtcagcctcaagcagctgtactaccgacgaggggtcacggttgtgaggacggacgtttgcgccattcaccgacatgctaaggaccgccgcaacgagcgacctgatggcaaccgatcggaccattgggctgacgagctgcgctcgcgacgacaggaacgaccggacaaagacgactgtgagaaaggtgacaaggacgagatcgtaggtgacgaccgtgatgctggcgtagcgctcgagaccgatgcggcagacttccttcccatcgaggacagacttgcgccctgcagccagaagaggagcatgggtgtcagcgcaaggatctgtctctcaagtgcaggccgctcgcgacgtaccgacaagcatgagcgccaggatggcgaccgcaggaagcatgagcgccaggcaggcgaggtagagctttgaccgcagcctcggcttgcgaacgggctggacgatccggaccttctcgatcaagaagaggataacggatatcttcgaggtgctgtagacaaggatgcatatgaggtttacgctcgcgcaggcctggtcgctggcgttggcgccaacgccgaacaggatcaagaggctcgcgacaaagaagagggcgctgcgtcaggaaggcggaaaggtcagcgatcagtcgagaagatctgtcaagtgggccggatgcaggctgacctagtgacccagttggcgagcgtgcatagccgggcgaggctccagctcatccaggaggagagcgaggtgaccctgagcccggtcgtccggcgaccgatgaagaaggcgaggctgaagaggcacgagaggactgcaaaaccgataggcgtttatcagcgtgcgactgcaatatcggagctctcggggggaccgtcctcgaccgaggcgagggaggaggaagccaaccgacagtagcagagggcgcctacccgcgcggcgtccgattgaaagtcgagggccatggcgaacgaggtttagacagctgagtgtcgagagggtcaaggtcagggtgcagggccgctcctcttcgtccgtcgacatgagcgaggttgccccccctcgacgagcccgagctaaccgagggcgcgggtcgacgaggaagcgagacatgcttagcctttcgcgctccacgccgcgaaggccgagggccgagtcgcaccaggcgaggctcgaccggacaaacgagcgccctatccttccaccagggcatcgagaagcagaccgggctgctaatgaagtcgagggaggcagtgatgttggcaggacgcaggcaaggggagctgcgagccggcgcaaggagttcgggcggcgcgcagcaagaaacgcccccctgcgagaaactgtcgacgagcgtctgagcgtctgcaaaatgttgtggtacagatggcaagaatcggctgtacaaagcgaaatgaaagacgggtggtggtagcatctagaaggtgtgataggagatgaggggtcatcaaggccggctcgcagccgggccgggcgtcggaggcggcggcgtctcgagatcgctggccgatgaactattcggcgactggtagagcagcgtggcgacgcgcgaaggctcccgcctctcgagttcatccttttcgtcgtcttgactgctcgtcggcgtcggagcctcgtcgggcatcgcagcattggtcgtcgaacaggtcgactggcgggccatgcgctcggacgtcgccagcgacgaggacgagcacttgcaggctaggacgggcggttgcgacgagcgtcgagctccgctgacgggcgccaatcggagatcgccggcgagggcctccaccatgtcgaggtggtcgccatggtcctggaggtcgccgacgacgccgcgcgagttcttgccgctactgctgccgagggcgcggatcgcctggcgctcgcgcttctcgttgccgtttgacgagccttcgtcgtctgtgcggatggtgacgacaaagagtactaccgggaggcaagaaacatcaacgattagtttcgaggctggaagaggaggcgggcgtcgcgaaaagacaaaccgagcgcattgacgatgatgtccatcgtgcacgtgagcaagcagagccacgcaagtttcctgaggagccgcaaagaggttggcttcagcacgccgtttgtctcgcaaaagccaaccggctgggcgtacctcttggcgatcgacaagtagattacattcgccagggtcgacgagattgctagcacggccgcaatgagctgcgaggagagaaagaggccgcttcaacgaatgattctagatgaagtgtcggtacagggcagcgaacgcacgctcttggtcgcaacgcgcttgatcatcggcgagatgatgtcgcggtctcgaaccagcggcgtgcaaaagccgtaggtcaggaaggagacaacgatgctgtcaaggagagagcgagttaagccgagcaggtccaagagaaggcatcgaggccgctttgcttacatgtcaaagaccgcgatcggcagggtcgcatagagctccaagcccatgtgacaggtgccgttgccgtcaatgtcggtccggcggcctggtcgcgaagaaggacaagattgacggtcagtgatcgaggtgcaaggctagcggaaacgcccgagaagccgctcaccaaacaccatgactaggagagggtgaaacggcgagggaagagggtcagcgtcagataaagctcgagcagtgattgggcactcactaatgatgaatgagatgcaggggatcgaaattgccgttagtagcgcaaggtactgcttcgaccgaagtcgcggcttcttgacagcctgaacgacccgcagcttctctagcagaaagagatacagccagaattttgagctggagtagaagcaaaggcagaggagcgagctcgcgttgcacgtcgtggtcgacttgctcatgcccgtgccgaatgaaagcaccagcgcggcgaagacgtaggcagcgctgcggtggggatggcgcgggcagccgaggtcagccagtggcgggcagaagacgatcactcgtgtgaaaaggactcacgagagggtccagaccattaggcacgcgatgcgagcgatgctgagcccaatgagcgacgcgagcttggacgttctccggccgaggatgaagatgatcatcatgagagctgaagaaagcagagcagcgagttcgtcaactgtcaaaggtcaggtgggagcgcggagagcagaggactcaccgaggaggactggtaaacaagggtcggcagagggggcagctcgagtgcgtcagcaggcggcgacgcgaggcgtcgctcgtaccaagctgccggcagcaacgtacgcgtgatcagatacagcaagcgcaacgactcgcgcgggaacacgaccggcggcccgacacttgggtggtctgtgtagataaggtgcggcatggtctgggacgagctgggcggtcggtcgacctggtaggcggaagaagggccgagtggagaagcggatggcgagagccggcgaacggcggcgaccagaacggcgagcggctggtggagagtcaaaaagaacgtcgagcgagtcgaatgccttgaggagctgagagcaatggtcggacggaggagggaaaaggcgagcaaaacaaggatgcggtcgggagcttgagggcgtctctttccttctcgatgagccccgtctggacggaggagggcagcgagagtgccgggcgtcggacaagccgcacggcccgcgctctcgcagccgccgagtgtcagcgagaggtgggatgaagggggtgagcgcggtgggcctgggctccgcgagtttgagcagagagctcgtttcagccggcgcacgaccgtctcgcctccggcgcgtgggagcgcgcaatccgcaccggcgattggcatggccgattgcaacagcacaggttatgtgtgtgcgcgccaccacaatcgaacgcacttgcctgcaatccatgtcagtcgagaggtcagttcgagggcggcgggaggccggacggtcagcacaagcgcaaataggcttcaggaaggtgtaggagtcgactcgttcgtcttcttcgtgtgctggaaaggggcagcgaccgaaggacaaaagggccggagtcctcgagccggcaagcaggagcttaattggtggcgtcgcaagccgccgagacctccaagagcgcaggcggcgtccgtccggcgacaggagtcgcaccgcagggggaggacgacaggagccgacactactggctgcgagctgttagcatagacagcgaagccacccgtctaagggccgccaagcgagcgaagcgaccacgaccagcgggctggacgacgccctccttccgctacacacgacaaaggagcagcgtgtgcgcaagcgatcgtgcgcgtggcttcgctccttgccagctggccgctctgacagacggtctcgggaaccgtcagacggtggccgcctactactatcctccggattttgcgcttcggtgagaacagctcgtatgcagtcttcgcgaccgttttgcgaagcagaggcagtcgcgacgtcaacaaaaggctcgtcgccgcaccgccagccgagcggcaagtcgtcagctgcggtcagcgacgaaggccagctcgtctggcacaggcgtgattccgccgatccagcatcaaggcaccatcagtcaacggctccgacctcggtccggtcgggccggcctactctattccgagcgagcgagaacgtcagcgccaggcgacgtgtacgcacggtccgcggcgccaggggtggtgcagctcgcccagctcgtgggcccgaccgcacgtatctggccgcacagcttgcctgcatgtgcgtctgcctgacagctgagcgaccaggcagcggtgctcttcgccggcgatcgctcggtcaacgagggaggaggtggttgaggcgagccgacaggagagaggccggaagcgctgacgcgccgaggttctggcaatacaggggcaggcgcctcgtcacggcaagctgacgccgtggattcatgctgagatcgaggcgatggaggatcgtcaccggctgctggtgctgctcggtagtagcgggagggggtggtggtcgagggagtcaagggccggtcgagcaaagaaaggggcgacgagcgcaacgaacagaggggtcgaccgctggcaggccagatttcgcaccgcttgcagacgagacgagtaaaatgaaaggtagcgcgatgttattgagagcgagcgagaccaagaaggagaggttgcgatgccagccgagaaaggcccgcgcaggaagagacacggaaggaatgaccggaaggagcgactaagagcccaagagggagaggatgcgacgagagtgcagaaggagagactgatccgggggcgagacgcacgtgagagagaccggaagtacgagtgtgagagagagagagagcgacgacgagaagcgagagggcgacgccggagcttcagcgcgtaaacttctcgccaaaggtcgacgtcgacgatgacgggtcggcacctgggctgctgctcccgctccggccgtcatcgcggacgcgggcgagggcaggcaggacgacaatctcgtcgtcgttggtcgagtggaacgcgaagtcgtcggtcaggccttcggttggcgtgtgccggtgatcgccatggacggccgacgcgtcgctctcgtgatactctgtgacaacctcggtgacgacagcgacctgtggcgagagtgacgaggtcagtcaattacaaggccacgttggagaaggacttggactcacgccggccgtcgactggaggccaatcgagcgctcctcgatggtgtcgaccgggtcgcgaccaaggccgagcgagcgcttgaggttgtcgagcaggcccttggtcgcacgcgggtcgactttgggctgcgccggccggctgagctcaaacggccgctgagtgaagtcgagctcggccgccttgatcgccgccaccgccttgtcggtgtcgtcacgcgggatgacgtagccgcctgaatcatcgcgcgggaacaagggcacatcagcggtaggcgcaacaaggggggggtggtcgctcggacgcacctccgtcctcgggcgagacgtcggtctcgccgagcttggtcgggtcgagtggctcgaccggctccggaaagtagacgtagtcgtttcggccgccaaaggcccccgaaccagggtggtggacgccgcgtgagccgttcgggacgacgctaccgctgcgggcgacaatgaccgaaggcttgccgttgctccgcatcgcaaacgactggacggcggccgagggcgacgaagcgccagggttcggctgctccttcggcaggacattctcgcgctccgaggccgtcgtgctggagccagacgggatcgtcacgtaaaagaggacgagcgcgttgatggtgacgtcagtgccacacgagccgagctggataaagtcagagttctcgatggtcagcccttgcctcgaaagcaaaaggtagcaggccgcttggaactcacacagacccagccgagctgacggccgtgcatgagcgtgaggatgaggatgttgaccgtcgaggtcgtcagagccgcgagcgcgctcagcatcgtccgaatcgcgacccgccggatctttgggttcttgaacgacgaggtcaggatcggccagacaaacagcatcgttaaaaagacgttgaggaagaggtcgtagacgagcagcgagagcgagctggcaatccgtcggcagaggtcaaccggctggcgcaacagcttctggcggggtctggcagggacgcacgcaaacttctcgaggccaatgtggcaggcccgattgtggtcgtcaatatcggcgacgcggccgacaatcatgagcacgaggatgacgacgtagggcgtccagaacagaagacagacacggtagagcggcgacttgagccgtggcttggacgtgttgctgacaatgtgcaccttttcgatcaggaagaggtctgatggcgacaaggaaaagcggggtcagcgagcgctcgggtctgcttcggtgagcgagacagatggggaccgcacagatcaacaccttggacgaggcgtagaagaagatgcacgagaagatgccgagcgagcacgtggccgggctgtacgacatgccgacgccgaggatgaggatgccagacgagtagacgaacgcccagctgtgccaggcaggcaaggtcagccgctagggctacgacgcaagtcgaatgaggggcgggacaaacgagcacacgtagaccccgaggcaagtcaggcgcgggagcgaccactgtcggtaacacgcgaccgagaatgggttgaagcggagcgagcgccgggcgaggatgaagctgaggatagagctgcctgtcgcgatcgccagcgagtggagggacgtcagctcctgcgctcgagcctggcttgactggcaggtgagagtcagcaggctaacctgtcaggactgtggtgggagcggggcggggagggtcagcgctggcgttggtttggctctcgcgcttcagcgacgagggaactgacaaatgacggccgacagggcctgcatctctggccgcggaaacacgacgttgggcggcatcatcgggaagtcggtgtacggaccgtgtcccatgtcggcggcggcgtcggcggtggtgagggcttgggtggtcgggaggcgacaggtggcttgctggtctggacgtgaaggttgctgaggatggctttcgttggtagagcgactagagaaagagggaaagagtgaagaggactggcttctgacgaggggcagtcttctcttggggatgcgagagacgagaagaaagggtgaggggcgggcgctcagaagaagggaggctgctcgactgctcggcaagagaagagggaggaggtagcggtgctgcgcgcgcgccgctggcgtcaaactcaaaaccagccccccaagacgcgtcgtcgcgtcgccgaggcgtgcctggcggcctgccggacgtgcctcgctcgctgcgagtcgatgagcgttggaaggaagaggagcggtcggaggcggtcagcagggtgcgagagttgcgcacggggggcggccactggcgaggtgccatcccgctgacggcctgtcctcgcgcctgcgcaagcagtcactggtcgtgcgagcgtcgtcatgcagagtgtgtggcgcttgcagtgagtagtcgaaagtagagagtcctcagagatcaacctgcaggataggcggcaggttggggatcagctgcagtctcaccagggctgagggacgcgctagccgacgtacgagtgcagttgcagagccgcgcgagcaggcccgggtcggcctcgatggcgtgcagagcctgcgagcaggccgaccgcatcgcaaagttttcggtgtcggcaactgcctcggccaggacaaccttgtggagaaggactaagagcaggacgagcagagccaggcgtattgtcagtcttggcggctgcaagggtcaggacgagcaccaaaactatacgctcgcacctttgaccttctgctgcttggcgttgccgcctgccgcgtggcggggtggtttgcggatctcgaagccggtgcagcgctgtcgttgagagaacggccaatctagcgtcagtagacgaggcgaggccacgaagcgccggaggccggaagaactcaccctggcggcaacgagcttgacaagaataccggccggctctgcaaacggaggaagagatgaggttgagcctttgactgaagcgggaagcgagtgagcgaagaagaaacggacgctctggcagcgagtgcatcccgctcatgaacttgatgaggaagggcttaaaaacggcgtcgaagaagtgctggcgcggctcgacggccgagtagccaccgtcgaccatgagtgcgccgatgacagcctcgatcaggtcgccgaccgcctaaatcggaatggcagagcgtcagcgggctgtttgtggattcagaagagagcagacggaccttgggcgcatccagatgggcccagtacaccttgtgcggccgcttctcctcggccgcggccttcagctcctccgcctttgccttggtgacgtctcgagcgtaacgctcgaccgcaggccagacggtaggaccctcttggctgaggaccttgtgcaggctgatgtcgacacacagcgccgagagcgcgacgttagagacgatgttggactggaggcagggtgtcagacttccggtcgagagacatgagtccgccatagtgacaaagcttgcaccttgaataagaccatctgaccgaccgacgcagttgggatgcgctcgtgcaagtagtcgatggccacttcggacgacgagacgggtatagcaacgaggggtcagagggcgtcgaagcgacactcgagaggagccaccaggacgcacagaggtcgaggacggcgtcgccgagatactcgagccgctggaagttggactggttgccggcctcgcgcatctgccgagcgaggatccctggtcagcaccgaccagctcggtgaaaggtgacgtgcacgtcaagacgtacgagagctgcccggagcaactgcgcattgtggaactcgtactggagcagccggctgatgtcggctgaggcctcgatgaccgactgcgggtagtctaccttggtgagccacaccggtagcttcgcaaagtcggtccaggcggaaatctcgggcatgggaagcttgacgacgcggcagaaggtccaggcagcgggaaggccgcccgtctcgtaagcggcgtagatgagggcctcgatgacgtcggcgcaagcctgacgaaggccgacgaggaagggatcagtgtgcggaacgagttgtatgcaagtgaggaatcccgcggcccgaccttgtcgccgacgaggatcatcttcgagtcgcgcacggcctcttcgttaaggttcttattttggctcgagccagacgtgtcccagcggcccatgttgtgggggtaccacgtcctcggcgtgtgctcgctcgcgagcaggcagtgcgtcaggcccgactcgacgagccgcgtcatcagaaacttgttgttgacgagagagacccgccggcgcgacagctcgccttcggacgccttcggatgcatgacgtagctgcagcagtaagagtggagcggtgatgtcgacttatcagtcgggcgatgcgagcgatgcagtttcagtaataaccaggacgcacaggtaggctgaggccatgcacttgaggacgacgtcgccagagtactcgagctcgtcgtagtcttcctcgcgatgggcggccggcgtcgtgagtgaccggaggaggaggtcctcgcgcatcgtcccaccgagaaggcccgttttgagctcaaagatcgtcaggagaatcgacagttgggtgaggaatgacggcaggtagagcgcgcttcgaaaggtgctgaagcgcaacgtcgaccggaaggagaggtcggggatgatgtctgcaggacacagacaaccagtcagatgagtcgattggaggggtcgtaggtctgggatcgacgcacacttctgatcgtgaacgaccttgcgaggcggcgcgttctccggaagctcttcgggcacgttgctcaagatgctgcgcaagtgtgacttgacggccggcaccttgttcatctcgagaaggggctgcgattcgctggagaggtagacttcttgagaggatgtcgaccggatgtactcgagtatcgacgagaaatccttttcgcgctgcagtggagcaagtcaaagaggtcagccgagaaaggggccgtacagtaaaaagtcaggtgacataccgggctatcgtccgggctcgagagcggcgtcaagtcgggccgaacggcctggacctcgaaccggcgcgagaattcgttcttgccggtcgtcatcgagtcggctgcctgcttcttgaacgcttcaaggtcgcgccactgccaaggctcgtaggcctcgccttgggcctcttggacctcgtcccagtcgacgccttcgtgcgtcgcggtcggcgggaggaagagatggacaagtagccggccctcctcaagcagaagcgaccggttgaggaccgcacgaagcagccggcgcgtgtagtggtcggccatcgcatgttcggccgtgctgagggcgactggcggcagcgccgtcaaagccactgggctcgccgtcgtcgaatgcggctggaagagcttgagcggcgtcaaggccgagaaggtcggcagcagtagcggcgtcaacatgagcaacggccggagcggcttcggtggtggcgcgttcggctcggcagggtccgccggcaggggaggcagggtgacgagcgtcgggtgccagatcctgctgcgctcgacggcgcccgtgttgaggatcgcctcgcaggcgtcgtaaaactcgggcgtcttgaccggaaaggcgtttgtgcctggtccaacaagtttcgggggcggcggcgcagaggcgtgcgatccggtccggtacgagttgtcgacttcgcctgctcgccagagctcgtgcatgacggcagccgctgccagcttacgtgcggccgtcttctcggctggcgcgctgacgaaaaccttgcagatcgcgttcgactcgggcgggagcctgatcgtgcacttgacgagcgtcggctcggccgggtccgccggcgcgtactcgtacgttacttgcggcgcgcgcttcttgggcgggttcggatgcgacgtcgacgctgggcgccgaagcgagtcttcgtaggcgacgacgaggttgttgaccagagcgggatccgggaaaggcggtggcgtctccgagtcggccttgcggacgggcttggccttaggcgggaccggcggcggagtgagcgctaaaggcggcggccgggcagtgggtcgagtcatcgcaacagcggcaccgaacattgctgcttgaccaggaggaccgaagccgctcggcactgttgcaggcggacggaagggcggtgggcagcccgctcccgagccgcggccgcgaccgccacgagctgcgccctggcccctgcctcgtgcctgggcaccgccgccccagtgaggcatccctccgcttccgcgacttgcgtctacaggaccgctgggacctccgccgccgccgccgattaagccatgaggctggccctgaacggcgccgtagccacctctgccgccggcagagctgtcatccgaccgcggccgagtgttgcgagcgaaggagctcggtccaggttgtccgcttccctggcgtttgcgcgagggatcgccgccgctcgatgagctcggaaccggtggccggacggacatgcccccacgtcctcgaccgcggccgggctggcctgacatgctgctgctggagctaggctaaggcggtgggtagctggccgtcgcgagcaggaggacttagcatcggaggcccaagattcatgtacgacgctggagggcttacctgatgttgtcgaggtctctcgcagacgattctgaccttgtcggcaggcgtgagtaggggagggaagtcaaggcgcaggcgtcggtctgccgagggaaggcacgagatcacagccgccgcatcagccgaggccacttaaaggcaacatgctcaactcaatcccgaagagcatgactgaccgactggtgtccttacttgactgctcgtacttctgagccgtaagtgatggtcaacggcgaggctgctggctgcatgactgcgagagggtctgtcgcgcgggattgtccgccctcgtcaccatggcagcgagacggatcggcgcagcaccaccttgtgtcacctcactcgcacaggacgagctggaccagtcaacatagaagctgaagaaggcccatgctatcgtaggccgtcgtcgtcatcctcctcctcagcccgccaagtgcgtgtgtcccaacttttgccttggctgcccgccctcgaacccggcaatcgctgcccgtcgccgaccagccggtgctcttcgtcgtcgtcgtcgtcgtcgtcgtcgtcgtcatcgtcgctcgatcgattcgcattttgctcgtcagaggcgacgacgacgccccaccgatcgatctcctccgcctcggccccttcagccgcgagcgagctcgcagtcgtctcgcccagcctgacccggcgcgtcctcgcccgcaggcgcgcgaccttgaccgggtcaggctcgaacgcggtcccggatccgccaaccgcgctcggacgcagccagcgcaagagggcccagagcttgccgggtctctggtctggagccgacttcgggcttaaggcgagcaagttcgcccgccagccgacgtcccaggggttgatggtcggctcccatcgggcctcgcgccgctcgcgctgggtgagcaggtgatctggccgccagcgaggacgggtcggtgcggcctgcgctgagacagcgtccggtagaacgagcgcaggcggagcacgcgaggccgacatagcctcgagtgtcgtcgtgttcgacctgtcgtaagcgtaagaggtgacagtcagcacgaactcttgagaccgccagcctcctccttaagacttgcagagcaagccaccaatgataaattgcgaaagggccgagtgacaggctaaagacgaaaccgtcgaggaccaggaggaagtgcgagatgggcgtgaagtcgttctcactctgctcgtgtcgcgcgcatgccggtcgcatcagtgttggagagggaacgcggatcgcggtgcgaggaacgcacgagtgactgatcctcgtcgacaaccaggtggtagacggtccggccggcctcggtgccgacaaagagagcgtaaaagctgacgtaagtcagaaagaggaggaaggcgcgatagttggcgtggccgatacaggtcgagagccagacgcagtgatggtcctgtgaagggcaacggcggtcagccgacagaggatattgcgcgacgtaatcgacggctcacgcaccatcttgaggacgcaacggccgcatgacgagcaatggtgacagctgggcaaagcacaggttcagctcatatcacggcaagaaattgtcgcacgcgacgtaccgatccggtttggggacgttgcactttgagcagaagcgccggccgccggtgctcgctttcgccatcaagcccggccctgcgctctggcttgcctcggtcgcggcccgagcctccgcgtccgtgcgagcttcttctcgccggacaagggcgtagccggtctcgtcgtcgttatcctctgcatcggccgcgtcgtcgagcggcgagccggccggcgtccgcagcgtgacgtggtacgcccagagcgcgaggccgagcaggaagtggtagacgacaacctggtaggcggccaggagcggctcgtcgcggacgccataggtcgtcttgtaggcgagcaggtagatgaaggggacgtatgggtagaggacgaggccaaggacgactggcggcagtagtaaagggggctcgtgagctcgagctgcgaataggcttgagacgggaggattgagacgtacagccgaccggcgcgaaggtttggaagttgcggagcgtgcaccaccgtcgagagcgtcttcgtgagactgatgagccgcgaccgaacgaggcgggcgtgataggcggcaggccggcgtagctgctagctcgaagacggttcagcggcggccaatgggagagacgaggcgaggcgccagcgagcttggccggccggaacgtactaggaatccggcaagaccgcaggcgcggcaatcatcgctgtcaaaggtcaatccgttccggcgccggccagcctctagcaccgacgtgaaagtcgtgaagctcgaggaggtggtcggcagatggaggagacaggacagggcgcctgcgcagcgcgcgtcgtctccgatcgacccgccgataggatgggtcgccctcacctgaaggcaacacgggcaccgtcagatggcccgcgatcagcatagagtgcaatcgacctctctctgccctccgtgttgagcttgtgacggctctcatcaaggaggtcagagggcaagagagcctggccggcgcgcccagttgccatggcacggtcgacaggtcaactctcgccccgtcgctcgtcgtcggcccttgccccgactgagcctgtccgacctaaactcacttaccctttgcctatgcgcacctgaggtcccctcccccccagctccttctccatctcctccttctcagtcgcacggtcgccaaagatgtcgggcggatccatgtcgcagatcaagctattcgccggtgagcccgcccgccgtctcgcccttccccgcgctgcccggcgcaggccttcgaggcagctgccgtcgggcttgcgctcaacgagacgggaaggctgacttgccgtccttgtgacgctgctcgtcaggaacgagccaccctcagctcgctcagcgtgtcgccaagcggtcagtccgctcgagctcaaagccgttgccgccctgttgctggcccccgctgacgcatggcctgcctcgtcccgcaaccggacgaaacggctgcttcttcttcttctcttcaggctcggcgtcccgctcgcagaggtctcgatcaccaagaacgcggccggcgagtcgcaaatcaagatgctcgagtcggtccgcgaatttgacgtctacatcctcaacacgggctgcggcgagatcaacacgtcgtgcgtgcctgctgctcccggcccgtcgctcttatgcgccggacttgtcctggccactgcgctgggttgagctgacactctcttgctctcttcgcttccggtgcggcttctgctttgccctcgcttacatcgctccttcagcctcatggagctcctaattctcatccacgcctgcaagatcgcctcggccaagcgcatcactgccgtcatcccgcactttccgtatgcccggcaagacaagaaggacaagagccgcgcgcccattacggccaagctcgttgcgagcatgctcgagaacgctggctgcgaccacgtcattgtgcgtcgccttgacttcgctgttgcatgaagcgccccttgctccgtcggctgacgaccgtctctcatcgcacagagcatggacctgcacgcgtcgcagatccagggcttctttgacgtcccggttgacaagtgcgtcctgttgcgcactgtcttgtgctcactgagcagcgactgatggagactcttgctggtcgattcgcctgcctcttctgcgccacagcgtgagtacctcgagcagctgatagacgctctcttaccacagtcgctgacgcagtgctctcacccaacctccagctctacgccgagccgtcgatgatccactggctcaagaccaactacaaggtcgaggacctcatcatcgtttcgcccgacgccggcggcgccaagcggtgagtctgacgcttctagtcaacctctggccgcgtctagtcactgatgtcccggcgcgactggcttgcagggcgacaagcatagccgaccggctcgaggttgactttgcgctctttcacaaggagcgcaaaaaggccaatgaggtggtgcgttgtccagcacccccacagttaccagcttccgtgctcacctctggttatccctccagtcgcgcatggtcctcgtcggctcggtcgtcggcaagattgctgtcctcgtcgacgacatggccgatacgtgcggcacgattggcctcgccgcgaccaagcttgtcgaggctggtgcgacaaaggtgcttgccatcgtcacgcacggcattctcagtggcaaggccatctcggtgcgtccctccttcagaaagcctgaagtctcgggagggcttactgactcttgacctgattcgcatcatcgcaggtcattgagaactctggactggaaaagatgatcgtcaccaacacaatcccgcaggacgaccgggcagcgcagaccgacaagctcgaggtcctcgacatctcacccgtcctcgcagagacgattcggcgctcacactttggcgagagcgtctcgtgcgtgcccgccgagggtcgtcgattgctctctcttcgtcgcacaagactaacctcgcggcatccttccctgctacagatacctcttcaacgagatcccgagcatggcctgaacctggccctcctgtctccgctctctccctcctccggccgcttgcaactctttctttatctctcgcttctatggtcctgcacccctcgctctcctcactctcgcaaaacaagcccttatcgaaaacgaccacactgggtccgacctcgtcctccctcttgtacaccctccacttccacccatggcctccccgttctctcatagacctttcctcagagacgatgtctattcgcgcgcagtcagtcgtctggccgaggcggagtcggccaacattgtgcaaagtccccgaccgacccaatcccttagcctcgtcgggcatcacgcttgccgccaccgggcatcaaaggggcctcgaggcgtcgacggcggccgcacgcgctgtttggggtcgctgtcctcgaaggacgatctgcgcgggcgagcgggcgggcgaaaacggcccgagtgcccgagctcgcggagaggggccaagcggccgggccgacgcctattctccatccgagacgacctcgacctctttcgataccggcgacgaagcagcagcacgacgtcaggccagctgaaacacctcagtcgggcttctcctctgctgccggcccgccgggctgatgcgctgacgagccggccagccagcccagcccgaaggcggcgctctttgcttgccagcgccgtcacgcgaggagaggaatgaatggctgaacgggacccctttctcctagctccgatccctcgatagcaagagccacctcgccgacggccggtcacggcgggcccactcgtaccgaccccgcaacagtcggcctgtcgctccccgcccatcgtcgggcggcatgggctcgactgggcaaagaaagaagcttgcctgccttcgctcggccactcctcctcgtcgctcgccttcagcctttcctcctcttggtcctcgcacgtttgcgctggcgactcgcaagcttcccccttgagctcaaggtccgttcgagcgagtcgtccttcctttccttccgtgagcaaccaccgggcgacatcgcgttctcctcctcttgcagttctgacgccgccaaatgttctccctcatggcagacacgatcgtcgcagctcaacgcgtacgttccccactcgacactccttccgcagcaggtcaagctccccttgagctgctgttcttggcccctgcgacaggtagctctgtcgtcaccaagccccgacgcctgggctgcggaggaagggagcgcgttgcgtgtggttgtcaaaaggaacgaggctgatttgcgcctgatcccctccggctacatcaagccaagctccagtacgcctgtttcagtttgcccattgtcgctgtgctatcgtctgacgccgtcttttcggaacccgtttgaactctccagctcgaggtcaggtccgacctcctccgtccgacggtcagccctcctcgacaccagcggctctttcggatacgccctccggcttctcggcctccgaccttgccgatccgcagctagcagacgacacgcacgccactagcatgaccgagcagccgaagaagagcgtcggccgcttcgcaatattctccggccgcaaggccaacaagctggcggcggcggcggcggtctctcaccctgcacgatccagggccgaggacgacctggagatcccggacagcctaagcgtcggcggtcgtgtcaacgagacgctgtcgacggcctcgaccctcgcccagccgcacgtcggcacgccgctcgacctgacgtcgacgatcggctcggcgggctcgtcggcaatcgaaacgatgcagtcgcccgtgccgccctttgggtcgcagcgcaagctcttctttccgatcaccgtcctcgccacgccggtcctcaaaaaggcgttcacgacgctgccttccggccaggacgcccactcgcacgccagcctctcgctctttgcccacagccggggcgactggaagaagcgcgtcgtcgccatctcgtactggacggcgcagacgcgcaatgtctcggccgtcaccggcgaggaggagagcctctcgtttggctggctgcacctgttcaagtcggacggcccgtcgggcaaggaagttggccgaatgcgcatcggccataactcactcgtcggcctgctggacccgagcacggtcggaggagcgcaggccgagggcaggaaacacgtcctgtcgttcacggccggccagcgaccaaagaagcgcgtcaacgaggtctttggcgaggccgaggagcggctcgtcatccagatggactcggaagagacgctccaggcctgggtgaccgagctcaaggccttcatcttcatcaaaaaggctgaactcaaaggcgtcggcaacgctgctcgagcgctcaagcagcgtggcgaggggctcgcaggcgacgtcgagatcctcctcgccaacttaacggattccgaggccaagaagcgcagcataccagcgactgtcgtcgaggttaccgagccctctccgtcggaagagtcggagtgcaggcgttggcaggaggccctggcggtctgcgtcggggttcccggtcctgctgcgcgcgagtctgcgcaggcggccgcgctcgctaccgactcgctcctgcagctcctgaccgagagcagcaagctcccgacctcgatgacctcgagctcgctcggcagcagcactgcagcaaatcctttgccagcaatagctggaacagccgtcaaccccgacgacgctcgcggacccttgccgctcgctcctgtcgaggtcagtaaccgacggccgccaccgacgaagcgggagtcgacgatgccgccttcgaccgacctctcgtactcgtacaccttttccgccaacgcctcgccgctgccagcgtttggctgcctccgggcggctctgatcccgatcgctgtcctcgcggccgaggtcgacaagaaggtaagcggcggcggcggcggcgggctcgaccacgtcggtccattctcgttcctctcgagtggcggcagcagcaggatcaagcccggcgtctggcgccggcggcacctcgtcctcacgagctggaacgctgtgaccgatacccggcggtcgacctttggctgccttcatgtctttgacgcggccgggccttcggcgcgcgaggtcggccgtctcatgctccacgcctcgacgctcgtcggctggctcgacgcctcggccgccaacggccaggaggccgacggccgcaagtttgttctgagcgtcctgccgaaggctagcacgacggccacccttgacgtcgatggcgagattgacggccgcctgctggccgacatggccgacgagtgagtcgcctcccttgttagcccgtgaatcgccgctgactcgtcccttccgacttctgccctcaggacgacgctcaaggtatggatcgccgagctcaagaagctggcgttcatcaagcggtgggtccggctccagcgcttatctctcagtgcttgttgcgaggttcccccgcctgacgctatgctcacttctttctcgtccagcgccgaagctaagggcctcggcgacctcgcccgcaacgccacgggcaagacattcggcgacgatctcgaccacgcgcttcacctgctgtccgagtcgacgctcgacgcgccttcgactctcccagccgctcgctcgggcgcacctaccctcgagttttccagccccggcggtcggaggctctcattcgagtcgattccccaggtccaggaaccctcaagcgctggcgagcggtccgagatctccgcctcggatcactccagcttccagctgacatttggcacccggtcagagtcaagctcgtctctcgccgctcggcttcgcgacctaagctcggtgccaatctcgcgccacggctcggcctcaccctcgcgcatcagccgcccggtcctgatcggctcatcgaatgccgacgtctcgcgcttcatcagccggatcgggaagctccctcacaccagcgagacgaccgactttgacggctcgcccgagtcgacggtcgcctcgccccgtgcgcccgagttggactaccacgcgttcgagtacatgctcgcccagcgcctccacccgcccgaccacttcagcacggcgggcgactcggtccggacgcacgtctcggccgagtccgacgccgcagacgcgcaccaggccgagattgagcggctgcggcgggtcgaggtcgagcttcgccagcaactcgagatcgagcgtctccgcggcgtcgaggctgacctgcgtgccgagctcgatgcccagcgcaagcggcgcaaggaggaggagcgccggcagatgcaatcagagtacgaggccgatggcccagcgtccggcaactctgacgtcgacccccgaggtccgacgctacgcaagcgttcggtcggctctagtgcctactcgcgcagctccttccccggccagagcgatctgtctgcttgggatgccggccgtcaggaccgccaaaactcgacgacgacggccggctcgagcgctcacggctccgagcacggcgccaagctgtcgccactctcgccgccggtgatgagccttagccggcaggcgagcagcaagttcagctctgggccgtcgacgccgctcgacgaggaggacgcgacgtcctacatgcgtccgcgatcgtcctctcggagctcctacctcggctcccggccgaccggcctcgctggagactacggcatggcgcagccacttgcctcgcccgttcggccagcaacaaagctcagcctcggccctccgccagctcctccgccgacgacgctcccgccgccgcctcctgtgacgtcggccgagatgagccgccactttttcgaatcaggcatggcgcacgagggcgggacgcgctcgtacaaccgtcggccatccgcctcgctcgagacgctgaacgagcggccgaccggctctggccgcgggcgggctgccttgctccgtcagtttgtcgtcccgccgcccatcaccgtgccgccgccgagtggtcccctgccggtgcccgaataatgccggccctcgtcttccacaacgcccttgctcttgcagccaggtcgggctgcctcctagcaaccgggttctaggaccgattgctagggaggcggttgcgtgacggctggaggcgcagcatcccatcacaaccgagggccttttgtcctcgcctgtgccggccttcctctcttccctccatctccgtctctcttgctgaagccctcgcccttcagagtcgctactcttgcctgctaccctgccactgctcctctgccctgtgcccctgcccttgtccgtccttgtcaacgacctttcgctccggttcgctgtatcacccacttcttgattctcgacctcgcctcctgcggttctctcatgttgtcgtctcgtcgaggaaagcgagcatcagagatcggcatctacgccgtcgtcctttggcagcgggacgtccctcggctcccgcgccttgcccttgccctggcccgccgtcgatgccgccgccgcatcctggttacctgagcccgacgctgccggaccgggccgagcgaacgcgtcaaaatcgcctgctgttgacctccggccgcccaccggcgcagtaggtctcgcgagcgcctgctgaacgcgcacgagttcggcgcgcatcgagccgagcacgccgtcgacgcgcgcgaggagcgcgagccggagctcgatcgcttcgcgcgtctcggccgcaaggctagcgagctcggcgtcggtgagggtcggcgggagggggagaagactgctgctggcggtcgggggagggaggggtgtgagagtgacgagtggccggccgtgggcggttgtcaacggcggcggtgcggcatcgtcaattgtcgacacgccggcagcgggcgaggacgacgacggcattcgagcagccggcggcgccgggatcgcgaagaagacgcttccgtcctcaagctcgacgactggcgacggcaccggtggcggcaacggcggcaatggagcggccgtcggggtcggctccgggagaggcgcagcggtcgtcggcggaggcgtcgggttgagtctggccgaccggcggagggcggcccgagcagcgacctcgcggggcgtcatggtcgtctcgtcgaggatggcgccgtcttcgacaggaatgggcggctcagtggccgtcacggcctcctcctcgtcggcaggcggaccacccttgaccaccgcgagcaggcgagcatcgtccggcccgagccaaagcgcattccgccggctcaagtcgagcacccatgtcccatccgcgtcgacgagtgtcagccgactcggcccgtcctcgtttgccggatcggcgagcgagaggtcgacgtcctcgccgaggacgagcgggaagagggcggccgtcgggccgatctgctcgggccggtcgtgtagcgtgccggcaattaggccaagcgcttcgcggatgtcgaaccgccgggcgctggaggatgaaacgcgcaagaaagaacgggtcagcgtgcggcgagagccataagcgaggggagagaggaggcgcgcaccgagcgagctcctcgccaatctcggtccgctgtgcatcttggacaatctttgtcaggacgcgtgtgaaactcgccgaggtctcggccgtcatcgcctcctgagcgcgcggggtcgagcaaggcgcacggacgaggtcagtcggggctcgagctgggccgcgatgccagccgggaaaagtagacgcacgctgagctcgcgcaggaggcgggtccggtccgactcgggctcgggcgcgacaagctcgaccgatgccgcaggtggagtcaccggacgagtcgcgggatcgtacaatggcggcggcgcggcggcggccggccgaggagttggaggctcaacaacggcgactgctactggcgggaaagaaggcggcggcggaggcggcggcggcggcggcggcggcgcgccaaagaagaagcgcaagtcgagctcaaggccaaacgcattgagctcaaagccgatgcctgctcggcgcgggaccggagcgacggcaagcgcgggcccggcagcagccaaggcggccgctgctgctgttactggggcgtgtgctgtcgccggaggctgtggaggggcggcaagcggtgggaagaggtgggcgaaccgctcgggtgggtgaggggcgccaaagaggcccccggcgccgactccgccagccgccgtctcaggcgccggtgcgaagccagccgtcggcgtcggggccggcccttctcgcgcagggagaactcctcctcctccggggtggagcggctctggcgggtgctgagcgaggtggtcgccgaaccggacaaggtgcgcgggaagcggccgccggtcagggccggcaggggcggcggcagtgggtgcgggtgcggctggattgccacctgcgaggtggtcgggcgttggaccaggtcctgctgctgctgcggctggagttggggctgcctgctgtgcgataacgggagcggcgttgggtgcgccgttgccgaggactgaccgtcgactggcgaatgagacaatcaaccgagcgaaccgtcagccctctgcgtgcgccagaaatgaaccgttcaggacgcgacgcaccacgtcggacagctctgctgacgctcaagccacatgcgcaagcacctgagatggaatgcatggccgcagccgagcctcttcgcgcgcctcccgccctcgacgtcagtaggccgcagctcgtccctgcagatgatgcagacgccctgctgcgccatctcgacagcgctcgcgtcggcatagcgcgactccatgtcggccgtcgcctggcggtagtggatgagcgagcggagccggccgaggaacgagcgcgtcgtcaggtagaggtcgcggaggatgttaaacggtaggccggcgtggatgaggacgacgataaagaagacgaggtagatgacgagcttgagaaagtctgaccgcgagcgatggaaggttagcgggatgagggttgggcgggaagtgggaggggacggaccggtcgtcaggtctaggtagaagaggaccatgctcttgccctcccacacatcctcctcggccgcttcgtcgtcatcctcatcttcttcctcgttaatcgccggtatcggctcctcgtcgccgttgccctcagcgagagctgcggccaccgtcgctcgcctccttgcccgctcggccgcgcgcgcgctccggccctgggcgagccgccactggtcccaggcccagacggcatacctcgcgccgatcccgccaagcgcgacggtcaggacggcaaactcggagacgaagatgacgcggcctgtgaggccgtgggtgaggaggtggccggccgagaacgtgaggaggagcaggtcgagcgggaggaggaagagggcgaggagcgagaagagccggaggtggaaggtccatcgcgggggcgaggcgagctgatcgagctgcggagcaagatggaggagagcggtcaggaccaacgacgcctcgacggcctcggggcgaggtcggaagcgcagcggcaaaggagggcgacacgcacatggtcgatccggtcagctgcaatccagtggaagcacttgaggccgagaagcgcgccaaagagcgcgaagaacggcaggccaaagtcctcgctgcaagtatccggggtgggtcaaggcgacggtgagtaagccggctggggaggagggtgacgcgtctccgttgcgagcgcgagatgggagcgagcagaaggaccgaccggaacatggtgaaggcgagagccgactcggtcaggaagtaccacgtccggtcgtagaggtgctatcgtaggtcaagctctttcagccaggcctcctttacaaggaaggcaagcaagcgagtaaggcaggccagggacggacctcgagctcgatcggcctcagctggccaaagaagagccgctggagggcgatgccggctagcagactgacgcaaacggcgaggttgccgagcacctggcaggacgacagagcttccagtcagtccctttgctaacttccgctcgagcgagcagaggggagggtaggcaccatgagagcgccgtttgacttgctcaagccgacgccgacggcaaagcccgtcgtctttgtgcccgctgcatcgaggacgacgagcgcggcgccgagggccgagctgagggcatagacggtcaggcgtgaggctgtcggtgcgggaaggcgtgggagggcaaagggcggcatggtgggaccggcccaaagggggaaagatggttgtggtacgggggagaagagcggccagctcacgcgcagcgacgccagcgacgacgacactatccctcgcaggacgacttcgctcgacggccagaagtgctgctctcccacttgaacacacacggtctgactgcccaaggcctgttcttactcctttgagccgcgtctcctcccagaatgtctacgaaaggctgtccttcattcccccaagcctgtgcgacggaccttcgacgggcgggagaaggcacatcgatcttccccttgttttggctccagtcccgaaagggagcgtctccttgacaaaggcaccggccttagacacgccgcggctggcgggcacggaggcctccgcgcctgtggaaggagtaaaatgtggtcagctcgggggcagtcagaagcgtaggaagagaggcggacgcacttcatgtggctcgcatcgccgagacccgtgcacagcggccggacaaagtgtccctcgcggcccatgagagccgtcaagaaggcctcgcggccctggccaaagccgccgataaagaccttgaagtagacgccggcctggcccgccgcctgctcctcggcctccttgagctcggccgaaatctggtcctggatgacgtcggcccctgccgtcgctgctgccgagcgcgggaggagggcgtcggacgggatcttgttggcctggaggtcgcgcagctcggacgagaggagccgaacagcagagttgtaggatgcgaggccttccgagagggagcgctgggcggcgccgagggcggcccgccgctggaggtaggaccggccggcggcggcggtgccggaaacgacggccttagggtcggccgcctcggcggacgcgagatcgagcggctcggcagcggcgtacgtcgtcggcgtcggcgtcttcggggcagcgacagcggggatcgcaccgtcggcgccaaagtcgggcgcctcgatctcgagcgccttgcgctcgtcggcgagcagcttctggcgctccttgagcccctcaaacgcctcgacgagctcgacccttcgctcctctgccctcgcccggtaaaagaccttgcggaagtcgcgcttctcgcggagcttccggccattctcctcacggatcgcccgaaggatcgcgcacgcgacctgatgaccggcctcaaagccgccctgggcggccttcttgaagccaacggtgccgcccgagatttgctcgcagccggggacgatggcacccgagtgagcgtaggcgagcgtcgcgagcgcgttgttgcgcgagaccttgaggtggacgttgatcgtgtgcgtcagcggcggggtcgggagcgaggtgaagatcgactggtgccgggccgagggcgagccggcgaggaaggcgcgggcagggccagaggtgagggccgtgctcgggaggtaaggtgacgagcgcgagaggccggccgacggcgacgaggcgagcgcgggcgagttgaggatgtcgttcaggacggacgagggcgggccgccggctggcaaagacggccggctggccgctccagccgatgatgaagacgacgggaggagcgcatcgagcgcgctccgaacgggcgacgtcggctgctgctcctgctgttgctcaacaagctgctcgtcgaccgtctttgcctcctggccgctgctgcctccgctgctgctaccggccgcaagggcctttgcgagcgctcctccactctgcatgcccttgagggccggcagcctcctcttgccgccgagcgccggcttccgtcctccttcgagcaagcctccagtaacagccggctcgtccgcgagcgggtcggtcgaccgccggtcggcccaggcaaggtcggctttgggctcggtcgccggagggaagagaccgtcggacggcgagccgccgttgctgctgccgcttgcgcttcggcaggaagaagcagcgggcagcagcggccgacggagggcggccgttgtcgaggtcgaggctcggcaaaagcgaagcatggcggtcgtctggtcggtcgtcgttggtagggttgaactgtcttctctcgctcgtctcgtctccgcccgcccgcgccaggcgttacgacccttacccggccgcctgtcacgacgtcgcctctcgacagcccaaccccgacctcgacctcgacctcgaccacctcctctctcgcgctctaggcatgctccgctcggccttcgccctcgtcgtcctcttctcttggctcgtgccagcctcggtccgggcagcggctctaacgatcgagctgcccgcgtcggaacgggcctgcttcttcgccgacgttgaccagattggcgagaagatcggtgcgggccggtcgctcgcgcctcttgatggctcgagcgtggaaggctgatctacttgggatcccaggcttctactttgccgtccaggccggaggcgactttctcgtcgactttatcatccagtgcgtggggcggacggcctgtcaccccgttgatgaacgagagggctgaacctccagcctcctggactcttgctctgttgctgctgccattgctgctactgctggccgctcgtctgcctctcgtcggttcttccgcccttccgcttcctcctactctcctcgtcgtcgtcgtcgtcactcaacccggctctcatcacgcgcgcgcctccctggcccgctgcgccccccctcctctcacagcgacccgcacgacaagccccttctcgaagagctcgcgacgagccagggcgactatatcctaacggccaacaccgtcggcgagtactcgttctgctttgagaacgaggcgagcctgacgggcaaggtgatcgactttgagtgcgttgcgcccctctcgtggtcccttcgcctctcgcctcctgccactttctcttcccgccgctcactcgccgacctcacacgcgcccgcccgcccgctcgcagcatcatggtcgaatccgagccccggcgcgagctcccgggtaagcagcagccgatcgcgtcgcacacgacctcgctcgaggagagcatctacaagctcaacggcctgctgtcgagcatcgtccgaacccagaagtagtgcgttccgctcgctttcaaagagctgggtgcgcttgagtcggcttggggaaagggccgggcgggcaagggatggcggctcgaatggcggtcagagggcagggtgcactccggtcgagcacttcggcccacgaaactcgtcgcccagcccaagcaccccaaacgacgacagccctccccatccacctaacatctcctgaccacccttatcttctcccacacgaagcttccacacgcgcaacaaccgaaacgagtcgaccgtcctctcgacccaggcccgcatcttctactactcgctcatcgaggccctctcggtcgtcgccatgtctgcgtgcgtcctcttagttccctcctcttcccatcgccgcttccttggtttgctcttcgcccgggcttgccttgcctccctcttccgtccttttcctcgtcccttcccttccgttgatacccctcgcgtccgccgctccagcacgcccaagactgacgcaacgccttccggtcccccccccccctcccccccccccccctggcacactctttgcctctcgccctgggcggtggccacggcatgtgctcggcttccaacatgcgcgcaaagttgctcaagcgctcatccgatcgtgaaccggacgatgcggacctcgccgaagccgctctcgagtccgcctccttcctctgcaccgaagaagacgcgcgggacggatgtagtgtcggtgagctcggtcgctcgcagaccgtgagcctctggcaggggtgatggtcaaagggaggggggtcagtcgtcgtgtaatagagaaggttctgatggcccaagtggaggcgaagctggggaacaaacgcaccggccttagcgaggaagcgcccgaacgtcgtctcgttgcggatcgtcgaggcgacgagggccgacctcgttcggcccttgtcgtcgtcatccgtcgctgagaggagccgatggaggatcgcgacgagcggccggatgatagaggggtcgtacaccttgagacgcgcgacaaagatcctggtcagctcgtgtcacacaacacgagagcgacggtagccaagacgagagacgaacgacgtcagccgcgacgatcaggtcgggtcgcctcctgatccctcgtggcagaccttgagcggtaagggggccatcaccgtctgctgcggacggagtcgaggttgatgaggcgggaggtaggctatcctcccagtcgagggcgacaacatcgacttcagcaggagtaaagccgtctgccgttggtgtggggggagaaggaagactgtcagcttcggccgcagggcgagcgggctcgatgcgcgcctcgcatgggcacgagcgtcgatagaaaaggaggattcgctagctggtctgaccaaccaagcgcagagaggacaaaagaggcagtcaggaggacgcactgaggtggacgttgtgcctgagccggtcgagcacgcgctcgtcaaagtcggtgagcgtcatcctgagcgccggcgctggaatggacgccgatattaaagcaggcggagccggaaatgagccagcggcggaggatgtcggagtggagcgctgatcgagcaaggccacatcccggccgagctttgcgaggaagaggccaaggaagccaacgcctgcgccgagctcgagcacgttgaaggtctttgccggctgtctcccctcctgctcttgccgcgttgacggtagcggcggcagtggaggaaacacgacgtccggccggtcaagcacgagctcggcgagccgtagcgaggcgccccacgttcggaggccggtcgtcccgtgcgagatggtcttctgctcctcggcgagcgtcacgtgcaaggggtgcagggttatttctgcgctggcggcggtggatggcgaagacgaagtgtccggcggctgcagttctagagctgctatcgatgaagggggaagtccggctgacgacgaccgctgcgcgatgtcagaccaccgagcgcgagggaagaagaacgtcttgaacgaggaggtaggaggggcggagcctccgaacggcgtcgtccctacgtttgatgacgatgaagatgaggactggagtgtcgagagataggctgaatagatgcgttcgtcgacctcctgcgagggagcgcaggacgggtcagcctggaacgcgagcggttggcgaaagggggaaaggatcagggacggacgagctcgtcctcgaccgcctccgggtgagccaggccatgctcgagccggtcgacgattgctcgccagaaggctctacggtagtcgcttgcgggcggccagcgcctgagcgggccgacctcagcgttggtgttgtcgccgtcgtcggacgaggaggggggcaggaggtgcgctgcgagggcggcttgcgagcggacaagctcgaggtcgtttgcggatgtgcgggggccgagggcgagagcagggatcggcgaaagggcgccgtactgatggacgaccgagggcaggtcgagggcaggcatgacgtctggtgtgggcccgcagacagctcggaggttaggctcaacgtgtcggctccggccgacgggctgatgcaacgggcaggttacgatgcagaccgacggacctcccctttctcgacgattcggtcatcccccgctctctctcggcctctctcccttctgcaaccaccagagcctcgccatgtctgtccgttctgctgtcgtccaggcacccgccctcgcgcgccgcgccctcaagccctcggcaaaggcctcgagctcgacaccgccctctggcaggtcgtacagctcggcggcgccgctgggcggtcggcgggtccactcgccgccgcagcatgccgcccggtcggctgcaccctcgcagaaggtacgttcctccttctcttcaacgcagctcggccctcgaggctgctctactcgatggcgtcgagttgtgttcgagccatcgggcgagttgcacgggccgccgacctttacgagcggccgagctgccggctcgcgtgagcgaagactccgctcggcatcgagctcggaacgctgacgcctactccattcctgcccgcagcacgccttccattcgtcaagtacagcccgggcagccgccaaggacccgtacaaggtcctcggcgtcgaccccaaggcggcgatcggcgacatcaagaagagctactaccaggtgcgtctcggccgcttccttcttgctcctcggacgcggggctttacgatcggctggggttgggcgctgctctcctcgctgaggttgactctcaagaagacaatggggacgcagctttggcagctgagggccaaagctgagagcgtggacgagctcgtcaacggctttgagctcttgccccaagcactgttctcgtccgcctgcgcacgcgtgcgtgaagcgccgactgacattctccttcctgtacgactctccagctcgccaagaagtatcatcccgatcagaacaaagaggccggtagcaaggagaagtttgttgagattcaggcggcatacgatgtgcgtccgaggctccggtcgccgaagcaaagcatcgaggcgggctgactgacgtgtgctgcctcgctctcagacactctcggacgacaagaagcgggcggcgtacgacacgtacggctcggcctcgcaggacggcaactttgacccctctagcggcggctcgccctttggctcggccggtttcggaggcttccacgacttctcgtcggccttcggcggccgaggcggggcgacgggcgacctctttgagtcgctctttggcggcctcggcggcggaggcatgggtggtcgcgcaggcagcggcgggggtcctcagcgaccggcaaagggcgacgaccttgagtcggcggtgacgatcgacttcctcgaggcctgtcagggaacgacgcgctccgtcgtcacgcaccctgtcgccgactgcgggccgtgcaagggctcgggcctcaagtcgggcgccaagcggaccgagtgcaagggctgcggcggaaccggcgtcaagacgtttatgatccagtcgggcttccgcatgcagtcggcatgcaaccagtgtgcgggcgcggggtcgacgatcccgaccggcaaagagtgcgggacgtgcggcggcctcggcaaggtcaaagagaagaaggtccagcaggtgacgatcccggccggcgtcgacgacgggctccttctccggatgccgggggcgggcgacctgcccctctcgggcccaggcgcggcgggcgacctcctcatccggatcggcgtccggccgtccaccgactaccggaggcaaggcacgaccctcttctatacggccaagattcccgtccacgtcgcgctgctcggcggcaagacaacggtcccgacgctcgagggcgacgtcgacatcaaggtcaagcccggcacgcagtttggcgaccagatcgtgctctccggccggggcgtgacgagcgcgatggtccgcgaccggaagcggggcgaccttattgtcgagtaccagctcgaggtgccgaggtcagtctggatgccgcccgacgcagctctcctgaaaagacaggacgctgatcaccgaccctctttcccttgactaggtctctgactgccgagcagcgcttcctgctcgagaagtacgcgggcacggtcaaggcctcggcccggtcggcctacgcgacctcggacggtggctacagtggcggctcatcctcgggcgcctcggcatcggcagggaagccgaaggaggctccgtcctcgtccagcacgaccaccaacacgagcggcagcagtaagagcagtccaggttcgtcgccgccttcctcctcctcttccaccctcgacgagggcgggacctctctgggccagaagctcgctggcaaggccttcggctggcttgccgaccggcttgagggcaagaagtaggggagggtctggtggagacagagcgtgcgcgcgactgtcggatgccatgcgctcttctcccctccctcctcctttcttctggccctccggaccgtcctggtcacagctgaacgagcgaggcttacgcgacctgttcctttggctcgttccgacagcagcctcggccgagcctacacctacgccctcctcgtcctcttcggaaacgacgagcaagggtcccttatccacggacgaggccgatggatcgtctttgacggactcgccgaagatggccgaggccaacgtgtgacctgccgacgtgcgggagatctagaatgcctacacttcccaacaatgtcgggctcttgatcgatggcttgggcagttctcaggcaattcgcgggacaaagggtggtgccttgggtggccgtgctggtcccagcgacactgcagtcatactctcacctgctcgcagtgtcagagaaggaacctcttctgccttccacctggcacgcgcctcccttcctgtctctattgcgaccgactagggcacaaacagtatagagacggcccttgcgctcagtttgaaacccggcctcgagcgcggttttcatctttcgcacttgtgggatttcgtggcgcgaaccgcgcaggccgcccgcccgcgcgacagctcgtcgtctttgctcctcgtcgtttctacaccataccccttcctctttcctctccttcatatcccctaaaatgccgatctcggagcacgagtacgacgacgaggagctcgacatcgactactcggagatcgagcggcagtgcgtccctcccttctcggcctgcggcggccttccgtccgcctcaggcgaccgaccagctcgtcggccttcgatcccttgctgacctgggccgtcctcccttgcctttaggttcgagccgaccctcgacgagggctttgagcacgtcctcgtcatcgacaaccttccaagtatgtcctgctctcctcgctttcaagacgtgcagtcagctcgaagctcggacgagcgcctgtcgagcttcgagcgtgtgaaagacggagagtgaaggccggcacagaagagctgacccgaacggttcttctttctgcacgtacacagtcgttgacagcgagaagaagggaaagctgctcgagaagctctgctcgcagttcaagaagctcggcgtcaacgcccagcccgagcagctcatcctcccctgggacgagagcgcggccgcctccaaggggttcgtctttcgcgtctacctttgcataaggtccgcatgggaggcgtgtcagccgagttgacctcttgtccctcttgtcgacctctctgctcgcagctttgccttctacgttctaccgaacgcgaccgacgccgcctttgcgcttcgcgtgctcgaccagaccaagttcggaaagaacctccttcacttcaaccgcttctcggacgtcgagcgctttgccaacgtcgagcctgagtggaccgagcctcaggaggagaccttcacggccaaggttcgcagcctctcgcctttcctcgcctacctggcgctcccttgctgacacggttcacctcggctgtacgccaactcgcaggcccatctcaagaagtggctcgccgacccccagggccgggatcagtacctgacgctccagggcacgacggcttccgtccactggaacggccggcagggccagactgaggagatcccttacaaggacgcccggtggggcgactacttcctcgcctggtcgccgcagggcacctacctcgcctcgacccacgcgcccggtgtcgccctctggggtggcgagcgcttccagtcgctctgccgcttctcgcacccccacctcgccctcatcgacttttcgccgtgcgagaattacctcgtcacctgctcgacggccgaccacccgatcacggtcgccgagagcgcgcccgcgggcccgtcgcagtttgtcgccggcgaggacgacggcaaccacattgccgtctgggacatcaagtcgggccggctcctccggacgttccccggtgacttcacgccggccgacggtggcaaggagcccagccgggtcccgcgctggccggcgctcaagtggtcgcccgacgaccagtacgtcggccggctgacgaccggcagccagctttcgatctacgccgccccgtcgatggagcttgtcgacaagaagtcgatcaagctcgccggcgtccaggactttgcgtggtgcccgctcggcgagaaggacaaggcgccggcgccggctggcaagaagaaggaggagcgggagaactgctttgccttctggcttcccgaaattgacaaccagccggcccgggtcacgcttatgagcttcccgtcgcgcaacatcctccgctcgaagaacctcttcaacgtctcggactgcaagctccactggcacgaccagggtgactacctctgcgtcaaggtcgatcggcacacgaagaccaagaagtcgaccttctgcaacctcgagatcttccggatgcgcgagaagaactacccggtcgaggtcattgagctcaaggacgccgtcaccgcctttgcgtgggagcccaagggcgaccgctttggcttcattgcatgctcggaccccaacccgggcccgggcgtgacgatcaagtacaacgtcgccttctaccagatcgaccccaagaagggcgacttcaagcagctcagtgcgttgccgcttccgcgactttgccatcgccgattgcgccgctgacctgtcaccttccctaactcctcgcagccctcatcgagaacaagccgatcaaccgcatcttctggtcgccccgcggccggcaggtcgtcctggccgcgttcgagtcgtcgcaaaagtgcgatattgagttctgggacgtcgactttacggtcgacgacaagaagaccgagggcggcgtctggggtgctaacgtcaagcacctctcggcctcggagcactacggcatgaccgacctcagctgggacccgagcgggcgctacattgccacccacgcgacgagctggcggccgggaaccgactctggctacgccctctgggacttcaagggccagcagctcaagatggacaacgtcgacagcttcaagcagttcctctggcggccccggccggcgagctcgctcccgaaggacgagcagaagaagatccgcaagaaccttcgcgagtatgcccgccagttcgacgaggaggacgccgccgccgagtcgcagggctcggccgaggtcctccagctccggcgccggctcgtcgacgagtggaacgcctggcactcggccgcgcgcaagacgctgctcgaggagcgtcacgcctcgggcatctggccggccaaggaggagaagaaggcggaggaccagcaagccgaggagatcgaggagatcgtcgaggaggtcatcgacgagcgggaagagatcgtcggctgatctacgccgcccacatgaccccgcgatcgtgtgatggatgatccgtcgccaccaaggctcgatacggtcgcttgggtaaagagagtgcagcgacaacaacattggatggaaagggggcagggcagggcaggatgaagaggcggagggcggcgaagaagggagggtgggcacggggcttcaagccgtcacctcgatacctcgatccctcgctcacgtgccatcgtccggctgcgaggcggatgagagaagagtcagcggacgggggcgacgcccgtcaccggaaagcaagcagggacgtacagctgctcgagtcggtcctatcgaaaggaaaggtttacagcatcgttggcattgtgtcagcttcgctgtgcagaccagcaaccagagcgaccaagcgatctcgcagggactgacagtgagcttggggacctcgagcagcttctgctcgagcgcctgcttctcctcttgcagcgcaagccgcgcgtcggggtccagcgccgcaaagacgtagccgccctcgccatctgtcgtggggcgaggagtcagcccgggcgccggttgaatctcgactgcgacttgcacataccgtactggagaatcgtgctgtggtacttccacagcgagggccggtgagagacagctgtagagaggattacagtgtcagcggcttgcggcggccggcaaaagcgctcgaggttgcggctgcacgtacttagcatggtgatgccgagctcggtcgcatgatcgtagctgagcgagcgaggcaggtcagccgccgctcttgcgcgcgcaaggcatgtctctcgggcaggtttgacgcacatcttcttctcgacttccagcgtgacgccgctcgtgcactcgtcaaggatcgcgtactgcgaagaagagagcaggtcgtcgcgtcagccacagagtacctccaagggatcaagtcggtgcgagagacgcactttcggccggtggtagaagagccgggcggcagcaattcgctgcttgtcgccgccgctgagagcattcgtccagtccttctgggcatcccagccgccttcgcggtcgacgatgccagcgagctcgacgatagccaggcaggccagcagatctccgtcggaccggctggcggcagccatctcggctggcgtgtccgggtagatgatctggtctcgcagcgtgccgagagacaggtacggccgctgggggatgtacgtaaagtcgtccgccggcggcttgtagacggtcccaccgagaacgggccagaggccgccgagaatccggaacatcgagctcttaccgcagccgttcgggccaacaatgagcaggtggttgccccgctcgacgcggaacgacatggctttgacctaccgagcgtcgctgaaagggtgtcagcaggcgagcaataccgagagaagaagggtttaagagagtctcgcaccaaaatgtcgccgtttggcgagacgattggcacgtcctcgaagacaatctcgtccgcctcgatgacctgtcctcgcccttgcagaactgtgctccgaaagagagtgaacgctcggtcagtcagtggcggttccccgacagagcctcggctgctggcctacgcacccttcgcattctcctcgaccgaggccgacgagacgagcttcttctggaaccggccgtccttgacgtcttcgattgtcgaaattaggtcgtcgacccgggcggtgtagcccgcgagctcggccagctccttgtacgagtacatgacgcggcccatcgcgtcgctcgccgaaaggagcaggcgccggttggtgacgaagccctctgtccgcgagccgaggtctttcacgacgcccgggagcgggaagaagaccgggatcgagctagtcggggcagcgccagcgagctcgtcagcgctggtcgacctggagacatcttgcgatgaggcgtaccagagaagcagacccgccgctccccacatccatttgatgacgccctcctcggccatgacgtgccacccgcggatgcggacgacctcgttgatgtgcttgacgagcgcaaagtatgaccgctcgatcgtgctcttttcgatctctgattgggcaagaagggggaagggggacggacatcagcgatgcgtcaattgagatagcatcgctcgacacggaccttcgccgtgatagaaagcaatctcctctgcgttctcgagcagtcgagagtgcgtgaagcgaagctcgcctgtgtagcgcgagagctgtgtcagcctcgccaagataaggatcagtttatagatgtgagctgaccctcgagctgcgccgtttgggtagcgaactggccaaaggccggcgtgatcgccttgactgaaagaacgaagcgatgagagagtctggttagcttagggaacgttggcaatggccagagccaagtcgagacgcacgcaaggcgctgctgctctggatgaggatggcgagaccgatcaggccctcggcaccgacattcttggatagctggttgctgaagagcatcaggtcgagcaccggcttggcaatgttcgagtagaggccggcgaggtgagacgcaaagttgttgatctgaaggatggacaagtcgtcagcgatgtcacgacacacgtagcaggcataggagcacgggacgcacgtcgacgacgatcatctggtccgggttcttgatccggtcgtcgaggttgcctgaagtgcggaagagcgtcaaccgatcgaccccggcgatgggacggaaggactcggctgctcccgcccgacgcaccaagcttgtaaaagacacccttgccctcgtcactctcttcgccgaggtagaggcccatgacgtgcttcgtcaagttcgtccggtaggccatctcgagcttcgactggatgaactcctgcgggaggatacgtcaatcgagctcgtcagctccatcggggcgcgaaataaaccactaagactcaggtacgcgattaggacgaacgagcatcgagttggtgtaggtagccgggacggcgacgagcacccagcgggcgaggttgaggaggaaggcggccggttgagcccggacgagggccgagacgatcttgccatcgaggtctggccattggatgcagatgagacggacgttagcctaatcccgatgctcgcgtgtcggagacgattggcgtacccgcgacgtagaggctgaggagcgtcctgaagacgaggaaggccgagtggaggacgagcaggccggcctcagtcgacgtgaacgacggaatgacgatcctcagcagctttgtaagccggctgtagaagacggcatcgacctgaagcaaaccagaggtagaagatgagccaggtcgagcgagcaggggtgaggttgtcagcccctcgcgcgcaagctgctgggtcggagcaggccaaaagagcgagcgatgcgactgacctcgaccctcggccctttgccagccctcgcccgacgacctttcggctgcttgccacctgcagcagcagcatcgcgggcctttgagctcgggaagacgacgctcttcgccgtgtggccgaggacccaggccaggagcgagccggttaggacgttctggatcgccggccgatggcggccgtagctggcggcaaaggcagccagctggggccgaagtcggtcgagcggaaccgtccggctggacgacatggggactgcgagagagagagagagagagagtagcaggctgtcgtcgagagtagtgagcgacggtgctggtgggtcgcttggcgcgtgctctctctcggcaacggccccgcgccggaagccggccggcgagagccgcgcagcagcccactcaggatccactctccgaacgacttgaaggatgctcatgtaaagagagagagagagaggccctggcatgaaggctcagctccctcacggctcgttcaagcccgttccaggtgctgcccggacatcggtccctgcggccgcgccgctcctcctgatgggcggcccacgccctcctgcccggccgtcatcggtcgcaccggcagcgctcggttcgcttgagctgccgctcagctcgacagactcagagatcgtcctcagttcagcagcgtcggccgatgagccactggccgcgaccggcgaagaggggatccgttcgcctaccgtcgcctgctcgctcggccgcgcacgctctgcccgtcggctgtcggcaccgccgacgagcgagaagcgacagactgggcacgtcccgtttgtctcgagccaggtgcgaaggcagcctatcaagtcggaaatcccttagcgatgcaagaggagcggaagcagaacgaagaggacgcaccgtcgtggaagaagtgcgtgcagggcatcttgcggccagcctggccgagctcaaacgcggcaaggcagatgctgcactcgctcgggtcgagtccctctattcagccgtcgatgtatagttgccagtcagcgaagggcacgtgagatggatgggctcggccgcggacgcaccaaggaggaccgagctgatcgggactcgaggcaaggcgttgatcgagctggccgaggcggatggaggccggtcggctgccgatccagctgcgccttgggcgaggtttgtgacgatgtggtcgaacgctggagagaccgcgacgagacgagcgtcagcatgaaggagttgccctccccttgagcaaaaggattaggcatcgaccgcggatgcaccttcctgactcgtcgcaaagtcgccgagctgacccccgccgccgaggaaggcaccgagcccgccctgggcgcgcaggagcgagacgaggtaagggtcgccgtcgccagcgccccgattgcggccgccacgacggccggccgaagggccagcaaaagcgccaatcaggccgccgagctggtaggcgaccggggtagcgagtcagctgctgatcctcaatcgaaggtcattactcgctgagggaaggctaacgaggtcgccaaagtcaagatcgcggccgttgccgttgcccgggaagcgcgggctgttggcaaacggctccatatcgtgctgtgcggccagcagggcccggagcgggtcgtcgggctgaggggccctaggtgaccggtcggcaggccggcggctgccgctgggcccgcctccagccccaaagccagcaatgaacctgtttggcgccggtctgcgtgagcttgggacgaggaaagggcgggcggcaagaagtcgagaagacgtactctgacagggtgggcacaccctcctggtacgtcgtcctcagcagcggctcctcatgacgaatccctccgcccgctccgttcccgctcgcaaacgccgcgcccctgcctgccctccggccatcggtcggctgcgtgccggttgtgttgcctccactgccgccgccgaaggtgaacgtcccgccgccgcggacgcccattcggaagagggccggctgggtccgctggcgctgacgtggaggggtcgcactacctgacgcggctcttgaggagctggcgccagaggcggacgagggagaaggggtcgagcctgtcgtagggaacgctccgggtagaggcctaagcaagcaggcggcaaagtcagtaagctgccacggagcttacggattggtcggacgcacagcgagtcgtcgtcgctcaggccatactcctggaggttgtggatgagctcggccggcagcaggtcggcaccgaagcctcccaattcgtcgtcgtcgccctgcggtgcatcagagcgaggacgtcagacaggttgtcagtcgccagcttggaggcaagaacgcaaggcgggtgggcagctgcgcacgccggccctcaggctcctatgacccgccgccccctgctcgcatctgggtcgagctctcctgtcgatcgagagggcacgacgcaccatgtcgacctcttcgagaaagtcggacccgcagcgcgggcaactcttggtgccatccgactcctgtgcgagggataaagggcgaggcatgtcagggtgctgagctgagctggcaagcggcggtggagacgaacgtcgtgcgggacgacctgctggccgcactaggtgacacgaaaggcaggcggtggtcagcccacgggtggcacaagctgcagggcggtcatagcggcgcacctgatggcagatccagacgctgtctggcatgcttgcgggcgagatgagatgatgacggatcgagggcagccgggccagctccaggccgctcccgcttgaagggccgacgcgcagtggcgaaggtgccgtgcggcggtggctgcctccgtcgaccttgacctcgtccgtcctgtcctcgatctcccatcgaaccctctctcaaatacactgcactcttctgctcggcccttatctgctctccgactagacgctctattgcagcaccgggtgtgacgtcggggttctgcatggcgccgccgttgacctcgccctcggccaacgtcaccgccgacgccgtgcgaccgtgctcttcctccgctcgctgctcgccctccttgctcacttgacttcgctcgacctcacagaacttctggccagagccgttcacggtccatcggccgcatcagcactcgcgcgtcttcatcggaccctttcctcacgcgaacgccaggacggcgcacggtgcccctgccggcactggccacgagcgctacctctcgaacgaggtcgaggaaggcgacgactaccacgtcaagggccgcaagcgcgacgtcgtccggcgtcagaagcgcaaggttctccagcgtcggcgccgagcttcttccgccagcgcctggggcgacgacgacggcggggccgagagcagcagcagcggcagcagtttcagcgagggaggaagacacgcggacgaccccgacggccggacctcgcggcgcccactccgccgttgtcgccggcgagggcacacgaccgacccaggcacggcaaccgacacggatgccgacggcggcgccgacggtcggcctccgcgcaggctcaagcgctgggtccaggacgcccggggcggccgggctgagcaaggcgctctcgccggcgctgctgcggcgtcgaccggcgacggccttccctcctcgacgctgcacggcaagcaggttagcgcctcggttgccgttggagtcgcggcgccgtcggctgaggaagaagagctcgtcaacacgatcatggctcccgtccgggatgaggacgtctcggaggcgcctgccgaccgaggctggtggaaggtccgctgggaaggcgatcgccggcggatgtcggtctcgtcctcgatcaacggcttcaccatgccgccaccgccactggcacctaccctcgcctccgctgctgcagcaaagaagcgtcgaaactcaatcgctacgacgacgatcgccggcatcagcagcgctctcggcttcaatcagcattcgcttcggggcgggctgaacgcatcgtcttcgaccggctcgacgacactcgcgtccaaaagccgcttgcttcctgtactgaagattgcgccggacgcctcggccaataccgtcgcaggccccggcagtcgtcctcggccttaccttctcgacccgcgcaaccaacttccaccgcctccgtcgccggcctcctacatgtcggtgccgaagcggccttcacgtcagggcagtcgaagcagcgagcgcagcatcgacaccttctactctgcccggaccgacctcggcccgcccccgatcccaggctcgacgcggccgagctttcagtccaacggcctcatcgacagcccgcctccctcggacgacgagggcgacgtcaggctccgtactggcagcggactgtcgagtcagtgcttcccttcgtcgacgacgagtgtcgacgccccagtcggaccacctgcggcctcgcgtccgaagttgccgcagatcgtccacaccgaggcctcgccaaacgcatcagcctcgtcttcgttcgttgcccaccccactcccctgccgatcgccgctgccgtttctgccactgtcgccgccaccgttggcgctccagcgccgcttcgttctgcgatgcggcgaccaacgcagccgatcctcaagggaccgttggcctcgacgcccccaaaccttctgcagacggttcatttccccccgacaacgggcccaacgccctcgatcggcaagcggctcgtcaccgacctgagggcccgcggcgcgggtcccggaggcggtggtctgcgttcgacaattgcgctcgaagaccgggccgaggtgattggcagctccggcggcgagcgaacggcaacgttcgggcatgtcagcggcgacgacgagcctgctccaccggaagaggtcctcaaccgcgagggcgggaccggcgtcgaaggcgatggtgggccgatgacggccatcccttacgagcacgacgaggacttcaaggtcggcgacgtcatcttgcgaggtgagtccaccatgatcggtcgatgtttgccattccagctgccagacgtctgatcctgctttctcttccctacgctcagaccgcatgctcgtcaagaagcagtggagccggtcgtctggtcttccgccaggctacaacgagcaaacgcagcgcaagatccctgtcgaccggagcgaggcctgggaggagcgactcgttgtcctcaagaagggccgagtcgaaatctacgacgactgggtacgtgttgcgtcacgagtcgaaggagacgcagtgctgacgacccgttgtcaatcacggcttagggccttccgttccgcgagcgtcttgtcggagtcaagaagctcatccacgtcatctacctgcaaaaggagacgtcgctatcgctctgtgcgtcatgaactgccgtccggcccacggctgggagctggcggctgacattctctccatcgcacagactcgaacaccgacctcaccttctgcctgctcacgccgccgacgtcactcaaggacgcccgctcgacccgtagctcctctggcataaagtccaggatgccgcgcattacccgcagcggaacgtccatctttatcttcaagatcaagtcgcgcacgcgagcgatcgactggatgtgggagctctacatccagctgcgcggaccgcaagcgcttccgcgctacctcgacgtccatgtcccggcctttaacaacgcccgcgttcgcctgcgggtgcccgtcgtcggcgaggacccaggttttgacagtcttgagagtgtcctccgccggctgacgcgcaagcaggtcatcaagcactgcgcgcgcatcctcagcgacgtcgaaggcttccgatcgctcctcgtcgagtgcggcgccctctcggcgaccgacctcgagcacggcgttgttcggggcgatgacgtcgacaagcacctcgccctcgcctggcggcacggtgaccggctcgactggatctgggccgacgacgatgtcctccagcagagccgcgactggaacgtcctcgccggcgccggtccacttcagtcggtgcgtgccaacgccccgcatcgctccgtcaaagtgtattctgctgacctttcaggccatgacccgcagctgacgcaaccggctaagctcgagctgcgactggcacgacacaccgcctcgattctccaccttaagtcgggcactcgcgtcaccgagcctcccgccgtcgagggctacctccaccgtatccgtcccaagacgggtgccaagaccctcacctacctaaccgtccagtgcgtctcatccaggccctcattgctgccctcaatggccaacagcttgctgatccgctctcggctcatctttacctctttctcagcgacggctgcatcttcatttgtagtccgatcaaagcgcatacgcctgcaccacctcccgggctcgaggttgatgacgccggcgagaagagccgcattgagcacgaccggccgacgactgaggccgccttcaagcggggcgaacgcattcgtgctattcagcagattctcagctcgaacggcttcctcgacttccgcgacatcgcgtcagtcgctcgggcgacgaccgagcacgtccgtcgcccgcggccggcctccaagtcgtcatcatcccgccgccgaggtctcgccatcgatgacgacgatgacgacgacgacgaggaagacgacggttgggagagcctcagcgacgacgagcgggatctcggcggcgacgagggtctcaagtcggttgaggaccagaagactctccaagaacgccggcagatcgtcgtccgactggtcaatggcgactcgttcgtctttgaggtgcgttatcagatcggtcgttggcttgccggcttgagctgacacttgactgtcgttcgtcaggcccactctgccctcgtcgcgcgcgagtggatcgaccgcctcaactcgctccgcatctactggaccgagaagcacctcgaggaggccctgcaggagatggaggtctcgcggtcgacccggatccggctaccggcgggcctgatgggcacgaagcagcgccagtgggacagcgatgacgagctcgaggaccccgatgacccgccggcctacatcgaggacttctgcgagtgtccgacatgatgatccgtctctcacttgagcatagcctgaccgacgtcttctgtctaccacagggaactggtgcgttctcgacgcctgccggccgattgtcaaggccggccgcctcttcagcaagcgccggcactggcagttccgggccaagtacaacatcctcgtccatggccatctcgtccagttttcgctcgacctcgaccggccgatccacacgcgctcgcaccgcttctttctcatcgacgcctacgtctacaccggctacctcgcccaggagggcctgccaccgtcgtccaacgaggcggcctatctcggcaagggcgagccgcgacgctacgcggacggcttccagacggatgatggcagcgaaggtgcgtcatttgcctctgatgtggtctccccataggtttgctgacccctttcgctttgtcagacaccgtgctcgtcatctggtaccggccgcatttcgtcacgaccgacaaggacaagtacatcgcccgggcgcagcaggactcgcaatacgttccgccggcgctcggcaattctggtcaccagaagctcgtccttcgagcccggtccaagctcgagcgcgacgcctgggctaacgcgctcaaccttgagatcgagcgcctcgcccggcggcgcaaggaccgcgaagaccgcatccgcagcacgggcaatgtcctctgacgccgctcctccaccgttttcacgaaacctcacgaactcttttcccccttcactctggcacgaacctgatgactaacggatacttggtttctgcggcgttggccgtctacgggacatgacgctgagcggcagagattagagctagagatggaagggagcaagcaagcaaagcaagacgagtcgaattgtgtcggagacggagcgatctatggactgagctgggggctgtgactttgcaaggagggaggaattgtagcgacgtgcgggcgagcgtccgagtagaaagacgacagggtgcgaagagatgagtacaggagggaacaatctagttaagaagagaggcgatgccagcggcgatggcaagcgtcaggccggcgccgaacgcctggcggacgacgggtgaagcggccgagccagcaccggtgctagcttggttggccgagtctgcggcgccgttggtggccgaggcgacgggtgcggtcgacgagcgcgagacggaggagcccgactgggagcgggaaaggcccgacgaggacgaagcggcggccgacgagacggaagacgaagcagcggacgacgacaacgaggcggcggcagaggacgagcgcggggcagcggcattgaggacaatggccgtcgtgttggtgatgccgatcgagccgacgatctctgacgtgccggtgagcgcgttcttgtactgcggcaggccgaaggcgcccgggatgtcggtcaggttccagccctgcgagaccatgctggggtacgtgttcttgaagactgagttgagcgagggaaagagggggtgagctgctgcagtgctactcgcatgacgccaaagcgggacgcaccggtgacgcagttgtcgtagagctcgtgctgaagcatgaggagaccgggggacttgggtccgtcaatgaagccctggacattacctgcgggtttgggcggatcaagtcagtcgcgagggacgtctgctatggtagaggagagacgcactctggatggtggcgaggttgccgttggttccaaaagtccagtcggcgctagagtaggggcacgctcaatgtcagcggagactgacgaaggagctacgggcggagcacgccaagcgcacctgtcctggttccagatgatggtgtggagaccaaagacctcgcccgcaatggcgcggacgcggttgtcgcagtcaccgaagggcggccgctggtttccagacaaaaaggatcagcacaggctgactcgcaggccgcgaacagcgtgacgcacccagaaggacgggatacggccgccattcatgtcggcgaggactgaaagaggagagccgttcgaggtcagctgcgttttgcgtgtcgcgtgccagactgctcaagtcagacgcaccctgcatcgtccagccgagctcgccaagcagctcctcgttggtctgcccgctcgagtagccgtgcgtccaagagtggacgccgaacgtctggtcgggaatgtcgcgggcctgcatggcgatgtcctagataacgagcactcaggcgtcagctaacacaaatcactgagctgaagagtcggcaagaggaggacgaacggtgttggcgacgacgttggcacctgtcgagagcacgtcggtcagtccaacgagcagcagaggaagtgaaggagaaaacgaaccgatgtagaagtgggtggcaggctgcttcatctccttgaagaactcgttgagctcgcggcccggaggaagcgggccgtcgtcctgtgagatctgcagtttggcaagcatgagaccgttcgtcagcccgtcgtgcgcgcggtgggtcggtcaacaagcagcggcgcgcgcgtcggacgcactccaatgtagccgtccggggcgttgaggtagtcgttcggcgaagagcagccaacagtgttgtggcaacgtccggggtcgctcggcggaacgccatcagagtaggagggcctttttccgggttgaggcggaggggtgcgagaggagtgagcacgaggcaggctgcgcacgcggctcagcacggcaagaaactcaccagccggcggtgagcgtcgcaatcgggatgttcgggatcttgccctgcttgacgacctcggcgagtgcgtcaatccattcctgcttgggcttggggatcgtgccggcgggagggtagcgagacttccactctgcggtcgcggcgagagttaggagagttgggcgacgacgtgtcagtcgacgcgcctgtcaagctgcgagagctcgacgactgcaacgaggatgagcacgtaccggcactgccgacctcggcagtctggcgcgtgaaaagcttagcgacctggtcgtcggacggcatggcgttggcgacctgagcgacaatcgtcaaggcgacggcgagcgccggaaggagcgagagggcgaccatgcttgggacggcaagcgctggttcgaggaggaggagggcgggcgagaggggcagaggtagaggcaaaggagtgtgcaggggacaaggaggggcgagctggtggtcgaagagcaagcagcggagggttgaggaggagctgttgacggtctgaacccccgcgcgctcagcccaccgccaagctaacaaaaacagtcggtgacagcctcgccggagccgctaccgcgtgagctccgccgtccagcgccgtacctggtcgacgagaggaggaagtcggaagggcgcgacgtcgacttcagcagcatgcattcgctcaggtcacctggttgagtcccaggagctcggccggcttcttgcccgtcagaaagggggttgccgaatcagcgggtcgtcaggcagcgcgcgcgccacgcgtccatacgtacggaagcttccggggcacagcgtcaggtcgtcaccgccgagcgaccctcgtgcgaacgtcggcgcacagctgaggattccacggcacgggtcgtgaagcaagggagacgggataggattcaagcaagcgcaggtgctacagtgtgcggaacgggcaggcaggaaggacaagggcaagcagtgcaaagccggggttgcgcccgagagagcgagagaccaagggtagacgggaagagattacatcatcgagccgacgacggcggcgacagagagtgacaggccggctttgaagaccgactgccgggtgacaggcgaggcggccgacgttccgtccttcgacctgctagaagatgacgagccctggtccttgccgctgttcgccgccgacgaggccgctgcggcagaagacttagtcgccgagcctgcagccttggacgcgcccgtcgaagcgctagcggaagaggtcgctgacttggtagcgcccgagaggtcaacggccgtcgtgttggtgatgccaatggaggagataatgtctgactggccgttcagggcgttcttgtactgaggaaaaccccaaaggccggggatgtcggtcaagttccagccctgcgagagcatcgaagggtaaactttcttgaagactggtgagcacagggagggagtcagccatcgctcgacagtggactgcagaaaaacccacgacgcactctcgacgcagccgtcgtagagctcgtgctggagcatgatgagtccgggcgacttaggcccgtcaacaaagccctggacactctctgcggagggcaatcaggaaccagattcgtcaggcttcgaccgttagagtgaagcgagcgctgggaacgaactctgaacttcctcgactttgccgctcgtgccgagcgtccagtcctcgctgtcctggttccagacgacggtgttgagaccaaagatttcgctcgcgattgcgcggacgcggttgtcgacgtcgccgtaaggagggcgctgaagttgaagtttgcagtcagcggaggaaggcccgcaggaggcagacgctgcgagctgagcgcacccagaaagacgggatgcgaccgccattcatgtcggccaggactgcagcgagggggtgttatcagccgcagccgggctagaggatgagctactgaagagagcaagcgcaccttgcatcgtccagccgagctcgccaagcagctcctcgtttgtctgactgctcgagtagccgtgcgtccaagagtggacaccaaacgtctggtcaggaatgtcacgggcttggatcgcaatatcctggaggggcgagaggaggtcagcgactgtaaagcgcaacagcagacacagatagagagctcgaagcgcacagtgttggcgacaacgtttgcgcctatttgacgaggagcggtcaagatgagtgggcgttagcgacagcgacgatcggcggcagctcgccagcactcaccgatataaaagtgagtcgcggcgatcttcttctccttaaagaagttgttgagagccctgccaggaggaaggggaccatcgtcttgcgagatctgagcgtcgaggggggtggggggaaacgtcagccagagcacgtcgaagggctcaactgccgcagacgagtaagactgacgccaatgtggccgtccggggcgttcaggtagtcggttggcgggtggcagcctagagtaccgtggcagcgcgacgggtcggtcggttgcacgccgtcgctgtaagtggggctgaaaaaatgagggagggacagagcgtgagactgctgcaagcgaacgagtcgcgacggccgatactcacatgccggcggtgatcgtcgcgacgggaaagtcaggaattttgccgagcttcttgacctcggcgagcgcgtcaatccactcctgcttaggctttgggatcgagcccgcggccggatagcttgccttccattctgcgagagggaagaggtgcgtcagctgcgtcgcccttgacagtcgataagagccaacacgaaccggcacttccgacctcggcggtcgaagcgcgtttgaagagggcgaccacctcgcggtcggtcggcatggctgaggcgaaggtggcggcgagaattgagccagcggcgatcgtcgagaggagcggcgagagagcgaccatctgggagagagcaaacggcgacgaaagaaggatagagaggagaggggtaatgtggtcagagaagcagatcgagctggcaagagctcttttgagctgttcagccagcttggcagactggacggcggtctgtcgcggtcgcgcccggtgtgttcttacccgacgccctgctgcgcgcgccggctcccgaattagcagattgctctgcgaggcttgcgggaccgcccgttgagcgtcaccttttcggaggccccctgcaggggtatacaccgaagccggacggccccgttgagcagcctcgcgtcgtgaccgagccaggtgacctcttggtcgacgacagcgccaggtgcaacgaggccaatgatcgtccggacaaatgagaccggcgcgtcaagacgtatgtgcatgagatcgcgatgaaggccgggtgacggtcgcgtcgttgcggtagtctgcccgaccggtggactcctcctcagccgaccttgatcggcgagccatcggtgcgttctctcttgacggagctcagcccggagccgttgaggaggattggaggcgggttgtcagtcgccgaggacgatgagactgtcgccggcgctggcggcttgatgggcgagctgcccggttggtctgcgccgcccttcgaggccgccttgttgggcgtccgtttggccttgggtggcgcgttcgggtcctttggcggtcgcttccagttgcccttgctgtgagcgagaagcaaggaacgtcagcaatcagctgaaggcgaaacgcaatcgagggtagctgtgacgcacccgacgccggtcgccttgctcttctttttcggcggcgcgtgctcgcgtcgaccccgggcctcggccgcggcagcgtgcgcctccttcttgcgcttcgccgcagctgcgctcgcagacgaggccgtcgggatctgtgccagcgtgccgagcttcttgagcagagccgggtcgaagtggtcctcggagagagtcgttgagggcgggagagagctgagcgtgggctgcggcagcggtggaggcggaggggcaacctcggtcggcaagggcgtcggaagaagcagcgttgagctagcagccgagggctcgatcgagacgtcggtcatcgcgacgtcgcttgccagctcgctggcagcagcagaggtagccggcgtcggcaaggcggttgtcgttggtgccgtcgatggcggcgcggccgacagcagcggaggtgcagggataagcttgcggaattcggcgtcatagaagggccgcaagaggccaatctgcagagggacgtcggacagggcaaagcggataaagtcgggtggtggagggtgctcgagcacgggttccggccgtctgcaaagaggcaggcttcacgtcagtcgtcgtctactgtaaggaggagctgaacacgagccggccgcacactctcgaagggccggggagacccttgttgccttggccgtgaaacagccgtgaggggacgctgaaggacgcgagcccaagctccttgtcgaggccgagctcgcggaagccaaagaagtcctcgccgagatcctcggcaaagttgctgatagaagaagtggagcagaagacgtaagcgcttcgccgcgaaggcgaggttgccgccaggactgacgacataaacatctcgccgtcgcctgcaaagagcatgtcgtcctcaatggcggtcgactcgacctggcaatcaacgaagagttgagagggtgtcagcgacaatcttggagcgaggggcgaaggagacgctgcagcgcgacgcaccgtatcggcgtaggcggcctgcatcttcttgactagctcggcgagcttgacgccgtggcgctcgacatcgtcgcgagcatagtgctcgagctgattgacatcgcgcgtgccgttctgatagagcgtgtggagaatcatctcttcggccgacatctttgacgcttgagtgtcggcataaaagcggagcgtccgaccgaggttagtgagaaaggtcgtcgtcacatcggtgattgcgtcgagcgccgcctgctgggagcctgatcaagcgggccaggggaatgagcagcgtcagcactggatcgagtgcgcagccagaggttgagcgagagccgactgaccctcgaagccggcgtgggcgagtaatgtcccgaccgagtgcttcatgccctccatcgcctgcgccgtcgacacctctgctcgcctcggacgcggtgcccgtagatcgactgggagccgtcgccagcgctccatctccatacgctgcgcctcgcgcacgtcgtctggctcgtcgacctcgtcgtcgtaggcgcccgccggttcggtcaaaggcagcagttcgagcccgcgcttgctcggcgaggtcgccgcatcgccgccgtcgagcgccgccatcctggtgtgcaggcgctggatcttgtgaagcgcggcaatattctggtagacctgcgcggccaatgagggatgctcgtcggcggccatcgggccgggtggcggaggatcggtcgaggaggggatggcaggcggcggagggggctgaggtttcgaggcgagacgacggccctcgccactactcggcccgatccctttcctccgccgcctgtgaaaatcctgcgccatctgcgggatctgcggcacgccggcgcggagcatgtcgtcgttctggacgtgcttccaccagcggccatcgaggtcatcgttaacctcgcccgccgagccggcaggggagcgcacgtcgagcgccgtctgctcggccgatggctcctcccaaggcgtcgtcttgacgttgcgcaggctgtgacgagccttcttgaggccgaccgtcggctttttgggcttggacgccgtctgcggcgggccggcggggatgcgcgatgggccggcaatagggtagggtgagtcggccaggtcctggtcgagctcctggaactgcgccatcgaggccgccgtccgctggagagccgaccgagttgccagcggcggtgagcgcggccgcatcgtcgcctgcgaggccgtgctgtcggtccggctgcgcttattcttaatcagccggccctttgcgtccttctcgcgcttggcgacaaccttgacagccttggagccgccgttgacgagcttgagctttttggccgcggcctcctcgtcgctatcgtcgtcgtccttaaagtcgagctcggcgagcgggtccttctgcgtcgcggccgcctcgacgagaaactcaaggtggtggtcggccttgcgcttcatctggatcgcatggttgcggatcggatgtgtctgagagggggcgcaaggatcgacgtcagcaggcgctctggttcctcataccgggtcgcgggctgggcgcaccggcgacgagttgtagagcaggcagttgtcccagatgaggtcgaggtcggccttgaactcggccttggtcttgtagacgcgcgtcttgacttttttgaggacggtgccgagatccatcgggtgcttgacgactgcaggtgcccggtcgggtggtcagcggcatgtgcggcagcgaagggggacatcggcaagcacagaccgagatggtagtcgcggacgtccttcttcgagacgggcttgaggaaccagtgggcgtcggtctgcgacgaaaagcacatagaaagtcagctgctgagagcgcgacgcgttcgaggtgattgcgcaggcggaggagcacgcaccgtcgtccggagctcgttgacgaccttctcgagcgagtcgtaccagtcgtcgctgcccttggtctcctgtaatgatacggcatctcgcaagtcagccagctgcgagggtttgaggctgcgaaaggtgaaagacagacccggccctcctggacgtcattgaggagctgcttgagctcgagctcattgagcccaagacgcgcctgccggctctcgagcgcctgtagaaggtactgttgggagcagagcagcgatgacgagcagcaggcagtggtcagcacgagcaagaatatgacgagtcgctccatcgtcgacgaaccttcatccggccgaggcagacgagctcgatgaccttcgggttcggcaggcgcggccggaagcgctcgagctcgaacggcgagcggggcgcgcgcgcgggaggacgagggagaaaagaaggccgggggcgagggcggtcgtctctttcgagccgggctcacaggcctgccgccagatcaaagagcgacgacgagagcaccgagcggcagctgaggagcgtcggctgctggatggcgtcctcggccgagcgaatgagtgagggcgagaaggggagagccgggcaggcgaggcggtgaagcagggtggtgatggcggtcggcggcgtcgcctcaagcccagatgcggcccgggtgcatgccccgcgcgggcgaccgagagcccagcgcgcggggcgtcgttgtctctgccggccagcgctgctgcaagatgcacactcggcatctcgtcgtaaactcaactcatccgcagggtgccgtggttgaacatgctgataaacgagagagaccgtgaggaaggaggcgagatgatacaaccgtgtcgaagtgtggaaacctgatggacggggtcggcccggacgctctaccttgcgccggcaccgacccctccaagacagacgaagggggacactcattcccgctaaccctctctttctcctcttctctcgtcgcgtgcgcacgtcgcacgcgcctgccagacgccccgcccacctcacttcttgatgagtgtcagaaactcctcgcgcgtcttggcttggtcgcggaagcagccgagcatcgtcgaggtgatggtcgtcgctccgggtttttggacgccgcgcatcgacatgcacatgtgcctggttggagcagaggaagcggtcagtaagcggcaaagccggggcgcaagaaggggccgtgccacgtacgaggcctccatgacgacggcgacaccccggggcttgatcgcctcatggatcgcgacagcgacctgcttcgtcagcctctcctggacctgaagccggcgtgaaaacgtctctgcgatccgtgcgagcttcgagatgccgaggacgagcttgttggggatgtagccgatgtgaatctgccgccggaagcgcaagcgagggtcagcgacttgcgcctgattcaaggcgaaggcaagagaacgcacgacgccggtgaaagggaccatgtgatgctcgcacaacgacgagatggtgatgtcgcggacgatgaccatctcctcgtggtcctcggcaaaaacggcgtcgttgatgacgtctgccggcaagagggagatcagccgttaaaccggaagtgggccatcaaagcgagatgctaccaacccgtcagcttctcttcgtagcccttcgtcatccacaggagcgcctttgcgtaacggtcgggcgtccggaggagaccttcccgatccggatcctctccaatgcactcgagcagcgtccgtacagctgccgatagcctggcaacgttggcctcagcctcttccggcgtcgagtggaggcggagatgcgagttctttgctgcaagcggcggcggtggcagaggcggtggagcggggtttagctcgagagctgacgacagagggtgccgagcacgcgacgacgcaccgggccagccaaggccgttctgatcaggaatgagcgcgttgagcacgcccgtcgccaccttcgcattctccttctcctgctcgggggccgctagcggctcgtcattgcgcggcgtaggcggggccgactctggccggaagccgtagccctcatggtgcgggaagccggcggtcgagacggcccgagcaaaggcgtcattcgggttcgcgtgacgcggtggcaaggcggggggaatagcaccctgctggcctggagcgaataaaggaagaaagcgatggaaaggggttgagtgaaagcaagtcagcaagactgcaagggaggccgggggaggccgatggtgtgaccaaaacggccttactggtcgacgccgctgacggaccgccgagcgtgacgccggcccggcccttctcccagtcacccgtgtggctatcgccgagccgctcgagattctcgacccgccgctgagcgtcctcccggttcttcgccttgcgcaggggcgaggcgtccggccgggcgttcgtggcgaggttttcgagccggagcgcgaggtgcgaggccgagggcgaggtcgagggcgacgcctgcgggccgagtgcaggcgccgaggccgacgagtccgccgagggtttactagaagggatgtccatcgccgggcaggtcaaacagtctggcgagacgggagtgggagcgagcgagatggagaggaagggtcggagggacaggcaggaggtcggctggtcgagccaccggtctctccgcgcgcgcggaaatcggtcggaggcagaatcccgctgcagcagcagctctcagcccacgctctctcgcctgcctgctctactctcaccctttcgccaccctcctcacctgccgttagctctcgtgcccggtccccggcctgcagacccgcagccagagagagccccagtagtcgttcaagttcagccggtcccagctgcgcgcggtcgactcccctattagcagccagcttcgccgtcgtcgcgctcctcctcctcctccctcctccgcgctcaaaggatggccgcccctcccatcccgcaggctccggcgccagcgcccgccttctacaacctctcgctcgcgccgccgtcttcgatctcggcctcggtcgccggcgccttctcgggccggccaaagacgcaggagatttgcatctcgcgcgggacccggctcgagatccttcgtccagacccggcgaccggccgagtcgaggccgtgttcgagcaggaggtttttggcacggtccgaagcttgacgagcttccggttgacgggcgcctcgaagggtgcgtgcctccacctgctgggagcaacgggcggcaggagctgtggcaactctctttcgcactggatgctgaccttccgacgcgaccatcgcctgcctgcctacagactacatcatcgtcggctcagactcgggccggatttcagtctttgagtacgtcgagtcgccccatccggcgttcaagcggctccacctcgagacgtttggcaagtcgggctcgcggcggatcgtccccggccagcaccttgcggtcgacccaaagggccggtccgtcatgatcggcgccgtcgagaaggccaagctcgtctacgtcctcaaccgggatgcggcaagtgagctgacgatcggcagtccgatggaggcccacaagaacaatgccatcatcacgagcatggtcggcgtcgacgtcgggtacgacaacccgctctacgcctgccttgaggtcgactactcggagagcgaccaggacccaaccggcgaggccttcatcaacgccgaaaaggtcagtgtgccgctcctgagctgggtcgtcgggccttgtccctcaaggcgtcaacgctgactagccttttgcccttgctcttgtcagatgctcacgttctacgagctcgacctcggcctgaaccatgtcgtccgcaagtggagcgagcctactgacccgcgggcaaacctgctcgtccagggtgcgtgccttctggtctcacgaggtccgtccgagtgctcgcgctaacctaatgcctgcctgttgccagtcccgggaggccagtctgcgacgaccgaccgctgggagggcccgtctggcgtgctcgtctgctgcgagaactatatcatctaccggcacatggatgcgccccagcatcgtgtgccgatcccgcgccgaaggtatccgaagggcgtcgccaactctgacggtgaggagcgcggcatcatcatcgtttcggctgtcatgcacaagatgaaggtccgtcctcgccactcttcgccggcttacctcgcgcgcgctcagggttgacaccctccttccgaacgaccagggcgactttttcttcctcctgcaatcagaggagggtgacttgttcaaggtgacgattgagcacaaggacgaggaggtccttgacctccgcatcaagtactttgacacggtccccgttgcctcgggcctctcgatcctcaagagcggctttctcttcgttgccgccgagtttggcaaccaccagctgtaccagttccagaagctcggcgacgacgacgacgagcctgagtttgcttcgtcgtcatacccgaagctcggcatggtcgacggcccgctcccatcggcctactttatgccgcacgagctcgacaaccttgcgctaacggacgagctcgactcactctcgcccgtcgtcgacgcccgcgtcctgggcctgctcgacggccaggacacgccccagatctttgccgcctgcggccgcggctcgcggagcgcgttcaagatgctccgctacggtctcgaggtggccgagacggtcagcagcgagctgccaggagtgccccaggcagtctggacgacaaagctgacagaggatggtgcgtaagccgccgctcgccgtgacctgatgcgctgtcgctgatcactgccctccctcagacgagtacgactcgtacattgtcctctcgttcgtcaacggcacgctcgtcctgtcgatcggcgacacgattgaggaggtctacgacacgggcttccggtccgacgccccgacgctggctgtccagcagctcggcgccgactcgctcctccaggtgacgccgcacgagatccggcacgtgctcgcgagcaaggagaagaagaagtggcccgcacccgaggggacatcgatcgtcgccgcctgcaccaacaagcgccagatctgtgtcgcactcgactcggacgagctcgtttattttgagctcgacgccgtcgacggcagcctcaacgagtaccaggaccgcaaggcgctcccggccggcgtgacgtgcatgagcatgggtgaggtgccccagggtcgccagcgctcgctcttcctcgtgcgtgctctttgggtcgctccgccaggtcgtcgcctcttgctgactctgagtgtcgtgctccccgcaccaggctgtcggctgcgccaaccagacggtccacatcatctcgctcgacgccgacaacacgtttgcgacgctcagtctgcaggcgctcacggccgtcccttcttcgatttgcatcgccgagatggtcgatacgtcgatcgacaaaaaccacccgacgatgttcctcaacatcggtctcgagaacggcgtcctgctccggacagtcatcgacacggtcaacggccagctgactgacacccgccagcgcttcctcggatccaagccggccaagctcgtccgcgtcgacgtctcgggccagccggccgtgctcgccctctcgagccggtcgtggctcaactactcgcaccaagacctgctccagtttgcgcccctcatctacgacaacctcgaccacgcttggacgttctcggccgagctctgcccagaaggcctcatcggcatcgccggcagcacccttcggtgagtcaagcgtcagtgtgcctgcttatacgttcgattgctgatcgggtgcccttgaccatccacagcatcttcacgatccccaagctcggcgtcaagctcaagcaggacgtcacgcccctttcctacacccctcgccgctttgtctcgcacccgacgagcaaagtcttctacgtcatcgagtctgatcaccgcacacactcgccttcagcgctgaagcggatcgcggcggagaacgtatgtcccctttcaggcccgcccgtcttccgccttctttgcagtgactgatcgagctccgctacgcttgcagaacacggagccgcttgacctctcgccggaacttttcggccggccacgagctgacgtcggccagtgggcgtcgtgcatccgggtggtgaacccgatcgagtcagcgacgctcgccaagcttgagctcgaggacaacgaggcggccttctcgatcgccgtcgtgccgtttgcgagccgcgggggcgaggcgatgctcgtcgtcggcacggccaaggacacgtcgctctcgccgcgatcatgcaaggccggttacctgcgcacgtacagtctgacggacgagggccggaatctcgagctccttcacgtgactgagatcgacgacattccgacggcgctcatcgccttccacggcaagctcgtcgctggcgtcggcaaggcgctccggatctacgacatgggcaagaagaagctgctgcgaaaggcggagaacaacgtgcgacgtttgcgcagcgagtttgatttgcccgagctctgctgaccagctcttgccttcccttccgatgttcagcacttcccgacggcgatcacttcgatcagcacgcagggctcgcggctgattgtcggcgacatgcaggagtcgatgttctacgtcgcgtacaagccgctcgagaacaagctcatcatctttgccgacgactcacagccgcggtgggtcgtctcgtcgacgatggtcgactacgagacggtcgccgtcggcgacaagtttggcaacatccttctcaaccggctgccgtcgagcgtctcggcctcagtcgacgatgacccgacgggggcgaccatcctccacgacaagccaaagctgatgggcgcacccaacaagaccagcctactcgcgcacttcaacgtcggcgacattgtcacctcgctctcaaagacgtcgctcatccccggcggtcgcgacctgctcctctacaccggcctgcacggcacgctcggcctcctcatcccgttcgtctcgaaggaggacatcgactttatgtcgacgctcgagatgcacatgcgggccgaggcgccctcgatcgtcggccgcgaccacctcgcctacaggggctactatgcgcccgtcaaggccatcatcgacggcgacctgtgcgaggcctatgcccggctgccgcagaccaagcagacgcagatcgcgcaggagctcgaccggaccgttggcgaggtgctcaagaaggtcgagagcatgcggaccgcctcgggcttctagatcatatgccataaaagcgcccctccccctcccttttgctcggggcgcgctgtatcgtatccatgcttgtaccgcatgcacgcacggggaagcacagcagggttgactcagacgatcgtgcggctcggggagaggtagcgggtcgccggctgcgcagagtgaagacgctcgcctgggtcacgtctttcaaccccgggcgtgtacatgccctggacggccgccagcaaatcgccttgcgagctaggcggcaagtgatattcggccaccgaagggctggcgccaaaggggtcgaaattcgactgccgactcggcgtcggcgggtagtgcgagacggaggaggctgacgatgcggtgcgaaggagacttggcgcgtgcatctgcgggtaatgcagaggctgaagtgcaggcgctggcagagcaaccccgccgtgcccacggagatcggccgccgacaaggcgtacggcgagtcctggtggatgctgaccgtcgtgtagcggtcgagcctggccgtctcgaacgggacgagcccgctcgagatcgggtcgaccgggacgctgctgatgtcgagggcaaagtgtctgccggccggcgatgtcgcttcgggcttgccccacggccggtcgtaggagagatcgtcgggcgtgatggcctcaaaggaggacgccgccgagacgcgccggccaaaggcgcggaagggcgacgaccggtcacctcggagagatggcggctccatcggccagatagtgggcctgcaagacgcgagaggtgtcagcgcctgaactatgacatctcagaccgggtcaaacgtactgcttcggccggtcaaagtcgccgggaaaggcaaggtgctggaagagagccgcaagaaccctgcaaggtgtggcgcagtctcgtcagatcttgctcaaatgcgcgaattcgcctaaaaagcagcttcacatcaggcccagaccaatggagagagtcacttgggtccgtaaggtcggctggtagtcgaatcgagtcgcgttctggcggcatttagcagcaggtcagccatcccgctctcgttggttctgatgcaagccgtgcgcaccacattgctcccgtcgagaatgagccgcaggccaaagctcatccctccctccctctcgaggatcaggtcgacgccgagcgacaagaggaaggcgccgttgatcgcgctcgcgatgatctgagcgatgggcaaggggggctggcgtcagcgggaatttagagccgcgtgctgcgaaggacaggacgtacgatgccgacccgccgttgccaaacgccaaacgacagcgtgccgacgaccagcccacctacgagcgcccacgtcccctgcaaagtcgggacgagcaaccccgccctgagcaaactcgcctggagaccgaccgccccgcctgcggcagcgcacagcagcgcgagcccaacgagccgtgcggcgagcagccagccaaggaagagcgcgcaggatgagagggccagggttgggatgaggatcgcgagatcagaatggagggtggtcgggaagtagccggaggaagggagcgagttgacgagcgcggtccagacttgcacggagcgcacgaggtcagcatgcttgggcttgggaaacccgaggctggggatggagacgcacgagagagggcgaggacgaggctggagccggctccgcaggcgaagctcttgagccgagagccggcgaagagcaggagtgtgccgaggaggaggcagtctgcatcaagggggccagcagcagcagtcagcgctggcaaggcaagggcggtcgagttggagccgcagatggacgcacacgcagcccagacgtagcggaggaagtcgccgccgccggcgctgttgaggacgatggaggctctggctgacagaatgctccgcggcgtgaccgcgcccaggggagagctgaggctgggggcgctgtggtcgaccgcggcagaggcgaggtccgcgagcgtcacgagtgagccgaggagtgcgagggcgatgtgatgctgttgcatcggagcggcgagaaggaaccgcgaggcggagatgctcgaccgggaacgagacgaaggtgaagggcggccagccgccaggggtcggagaaggaggaaggagagtcggagcgaacgggaccagcccaggactgagaacgaaggcgggagctcaacgagcctcaaggtggtggtggtcggactgaaggcttcgcaggccgcaggaaaagccgctcaggttgcgaggaatatcaggaggggagctcgtcgttcatttaaaggccgacaggaggcgggttggcgggggcggggagaaaggggcagacctggccggccggcggccgagtgccttctcagtcgtcggtcgtctcgagatagaacgccaggccttaccaggctctctagtagacccggtgctcgagtaagcctgcccgacgtctcaattggcggacaggagaggtgcagctggcaggccttgagcaagccgcaagaggaaggctgaccgccgaggggcttgctcgcgcacaaggcacccctgtcgccctctcgagacagacctagaagggcagggcactacgccgcatgagcggagatcagctctgtccggacagagatgaacctggatagggccgctttgtgatggacgtcgagcggcgagaggtcatcatcggccgtgcaggcacaccgcctctcgcgctgcaggccgaagctcgcgcgcgggcgcaaagaaggtcggggcgagggcagctgagctggcttgcctcacctcgacccctgccccggtccctctcctcttctcgtccgacgtccaggtcgctcgttcagctcgtacgtaaacgctttaccgctcggcccttttgctgtctgctttgtggaagctaacgctcaattcctccctttggcactcccagcctcgcctcgccttgcggatgtcgctctccctcctccggccgttgcgctcgtcggcggccgttctccctcggctcgcctcgtccatcgcctcgtcctcttctcctgctccagcgcgctcgctcctcctccgctcatccctcagcccgcgcccgacgacctccaccctctccctccctcgcccgcaagcccgctccttcgcctcctcgcccgcccgcctggcgtcgctcggccaggttcaccgcggctgccgcatcacgccctggaagtcgatcaagcgccggctgaagtcgcccctgctcgagcggtgcccgcagaagcggggcgtctgcgtccgcgtctttacggccaagccgaagaagcccaactctgccgtgcgctctctccctgccttcctgctgctgccttgcccggggctgagtcgatgccgacgctccccatcctgacgcccttcgccctgcgcccttcgccctgcgcccttgcccccccaacccccccgcaggtccggaaggtcgcacgtgtaaagctttcgaccggcaagctcacgtacgcctacatccccggcgagggccataacctccaggagcactctgtcgtcctcatccgcggcggccggacgcaagatttgcccggcgtcaagtacaagatcatccggggcacgatggactgtgcgggcgtcgttggccggatgcagggccggtcgaagtacggaggtatgtcgtccctttggcctggacccgcgctcggaacggacgtcaggcagctgctgaccgcctcgacctcctgccttccccccctgcagccaagaagcctaagacgaagtagagggccgtgcatcgcgcgcctgatgatggtcatgcgcttgtaagaagcagctcgtccgctttgtgctgatgggcgttttgcttggatcagacggctggctcgggtggaacggcggcctctgacgtgcgtgtgacgggacccacggcaagctcctctctgatgactcgaacggttgctgtttggtagtacattggcatcgaccgaagccgtcacgatgactcgacgtcggccgcagccgcctcccccgcctcccgcgcagcacggtcgcgctcgacagcctcgtgccagaagggcgcgacggccggatgcgagcgcatgcgcgcgtcaacgaggacgtcctccatctcgcggtgaaggatcgcgcctgggtcgggcagctcggccgagggctcgaggatcggcgcgagctcggaggtgaagatgcgggcggctgtgcaagtcggcatgcggaggaggacggtcagtctccgggaaacgatgacagcgagagacggtcttgggaggacgaaccctccgactcggccgcttggacgagcgccgtcagctccgccatcatccgcgcctcttccaccatccgccgctcgcggtccgtctcgctctcgtcggccgcgctgaacccaacagcggcgaccttcgcgacaagcagcggcgcgacctggttgaggaacagggtcgcgctcatagcgagctggcggaggacgaggacgagcgcgtgctgcgtgaggcgcgggaaggcggccgagagaaagcgtattggggttggcggccggtagacggcgctcatgtcggaagggcctggcgcgggcgcgacgaggagagagagctcgaggacgcagaggacgggcaggataaagtagcgccactgccgcgtcacgaaggcgggtcagcttctggtgatactcgaggggttgcgcgggagagggcgacgcacgaaagacgtctccttggcgcctgtgccaaagaaggccatcgcgccgtagatgacggccgacgagacgtagaacccgagcgcgtcctgcaagccgcgcttgagaaattctcgtctcgtcgcgcaaaacttccaccagcgcgtcgactcgggcccaaagcggtcgtacgcccagcggtgctcgtcgtcggcgagcgtgtcgtacgcgacccggccgatccggaaaatctcggccgcgctcgctgcgtcttgcgcgcctgggccgcgttgccggtccgggtggttgcgccttgcgaaggccttccagccggcgctgatgtcggcctgctcggcgaggcgcgggacgccgaggacgtcgtagaaggacggcttgaagaggatgggcaggaccgaggcggcgagcgagaaggcaaggtagagcgagaggatcgtcacgagcagccgccggtaggacgctgggttccggagccgggccggcagcggaaacagcgggatgaggctcggcaggacgagggggaaaaaggtggagactgcaggaggtcagggaggcgaggcgtcagccggcggcgatgttgaccgaaggaattccggcgacagggagcgcaccgagtcccatcttgaccgcagacgatcggcctcctgttgcggaccgagcgtgccagagcagagggcgtcagcatgcccaagaggcttcgagtcaggcttcagcagtgtgcgtgtgtgtgtgtacgtgcagcgccaggcagttgcgccaaggtcgcgacggtacgtctgctcagtggacccggaggcctcctagagttggaatcttgtccgcctgccagccgcctcggacagtcgactccttcctctctacaccctgccctcctcgcaggatgttcgtcccggtcggaccctccgcagccgcccggccgcaggtcgccctcgtgcaagcccgtccgtgaccgcctcgacccgatccgacttcccaggcggcctttcccgcccgacgcccaccccaacctcgccaagccacccccctccagagccgcactcctacgactactcgagggcgcgttagagagtgtgaagcccgcctgcgcgcgctctgaactccggaatcctcacgggccgatgcgtgaagctcagcgcaggcccgctgttgcggtgttcgacgccccgcacccccttgctcatcgcctccagccgccacgacagcgaccaaaggcgagcgagaggacgacagagacgttgtggttatgaatgtccctccgttaagttagctgatccctcgctggttccacccgcgcgccctgggtctctgggcgggcgggctcggcctgtcctggtagggtcgacgcaaggtcgattctgtgcaagttggtcgctccccctccggccctcatacgagaaccctcgagagagcaaggctgtggatccgagcctttgcccccctgccgcacgaggggtctacgctcgcgcgctcgccccggtgcgccgcctccatgggagctcgaggaggtcgggggcctatatctctggatcctctccctcggcgagccgagagaggtgactaaaggtccggccttacgccccggccagtggagctgggaacggccgaggctgtgaacggaccctagggttgcggcaggcggcaccctttggcggcccgtgggcacgagagatcgaggagcagagaaggggaggagggaaggaaaggcgcgtgatgggcgacgcaggcggtttcggaggcgggtagtcgagcttggtaggccaaggcagtcgaaagaagggggggaagcgatcgcaaaccaggcggccacagagagccgtcggaacgaacggcgaaggaaggcggaggcgacgagaggtcgagcaggaccggcgtccagagacggcggcgagggcggtcatcccttttactattgagacatcatcgcaggaccggtcgggacctcttggtggcgactgacgtgtgcggcacggacacacacgcacacgcaagagacgggatgagggacgaacctgggctcgttcgagggcaagagacaatgggccgaccggcgggcgacgaaagtcgagctcctgctgaggggaagagcccacaactgtccgtcagcggtgcgagcgtgagagggaaaggcataggacgagacctacaggcagtctccgacctgtcagagagcttctggccgagaaggaggttgggatgtcgtgtcaagcgtgaccgtcgagaagtcgagccgagcgtcgtcctgcgcgcgagcttccgcccgacgccctccttcgaactcgccacagtcccctattttctttctctaccttcctgaccgaaagcaagaccgaagcaggcctcgagagcacgtcgagctcgtcccattccagcctctacctgtacagggcgactcaaacgcacgccgtccctccctccgtcggaccagaacatctagccgcgcccggtcagcagcgtcatcgtccagccacctcgcaggccgccatcgaccggtgagcagaaccttttctgactttcctcgaagctcagctgtcgccgtaggggatcgctgctagtagcatgagagtcgtacgtctggtaccctacaagtagagggcctccgaagtgctcgcaacggacgtatgctccgtcgcccataggctcgctcgcgtgagcgaacgagggctgagcgaggtgacaccggtcggcgttcacaacgcagcaggactcgtcgtcctggctcatgtccatgctcagaatctccgcaggacgatgactgacgagactgctcgcctcctcgctcgccacagcagtgtaccaggtcgctttgtcaagccaaggcgcccttcgccgaccttctgaagtgtcctacgccgccgccttctgccgaccgatgccgtccgccccggcaggaccaagtctctgcagcgacgctgcgccgtcagacgtcgctatgcttcttcgtacgatcgcctttgcttcggaggtgcgtgtcaggtcgctttcgctcgctgccgagcgtgcgagctcacggtgtcgaccgaccgccaccttacttgccagatgctgaccataatctgcaccttttatcgatggctctgcagaagcacgccttccaggtcagaaaggacccggcacggacgccctacatcaaccacccgagtgagtctggttcgcctggtccctgacgctggctgcgcagtcgctgaccggtccttcgcgcgtctacttcccgcaccagtcgccgtcgccaacttcatcgcagggacgggcgaaaccgacctcgtgactctgcaagcagcagtcctccacgacactgtcgaggacaccgattgtacgcttgccgaaattgagggtctgtttgggccggacgtcgccctcgtcgtcgaagagtgtaccgacgaggcgggcgtcacgtcgttccggagcaagcaggcgcagatcaagacgtgcccgaacaagtcgcggcgagcgcgtgcgtcgagaactccctggcacgccctccccctctcgcgagcagctgactgagcctaaccttgtcgattgccctccctcgcagaccaggtcaagcttgcggacaagctgcacaacctgctgtcgatccagaaggcgctccccgtcggctgggatgctgaacgagcgcagcgctactttctgtgggccaagacggtgaccgacagtgcgtcctgcgtcgctcaccttcagcctacccgactcgcagagctgacgcctggcccgacagtctgtgccccggccaaccctgcgctggcggcccagctcgagacgctctacgactcgggcaccttcatattcaagggtaagaagcacccttgtctgccaaagcggccggccgacctcaaaggctcgcgccacgccgccctctacccgccgatacccgagcggctgctccggagcgacgagccttgaccaggtcacactgtcgtcgtcttcctcccgctagccctgctcctgccccccttccttgcttgttcggcctgtttgcacccgtctcagctctgcgccaacggccctcacgacccgctctccatccacgaacactcttcgccctccctgtctctttgaatcaatgtacgaccgcgattgcgcccccaagagagcggcggcagagagaaaagagggtcacatcatcgagtcctcgatctccatcgtcgagccgtcctcggtcatcccgccgccgtgcatcgtcgacgaatgctggccggccgcagcaaacgactggctgtagctccggctcgggtcgtcgtcggccgtcgaccggtcgcctgcacgactgccgttcgactgctgctgctgcgaccaggaggcctgcggcgcctggaaagatggcagggaggagatggccttgatcggaccgagcaggtcgatcgaggcctggagggcgaggttgagcagaggcgtgacgtgcgctgactgcgggttgagcgacagggcctttatgaagtcggcgcagagatcaagccgtctgtcagccgggcactggagagtgagaagggacttcggcgacgcacctcgtggtagcactcgatcgcctcgttccatcggccctgcgtctggtagaccatgccccggccggcataggcgctgtcgcagacggggtggagctgaagagcccgggtataagactcgagcgcttcgtcatagcggctgaagcatggcagcagaagtagacgttcagcatgcgggcgacagcaggtctacagcagtggaagagcgcactgagtctttcgaagggcgtgggcgagattgaggtgggtcggcgcccaaatgatggccgagccttgcatgtcctcggccgcctcgagcgcgcgagcaaactcgtctgctgcctggccaaagctgagggacgagagccggatcagcctttggaccctaatcgagcaaccgcaggccggcgcaagagatcgacgcatgacgtactctccgcgcgagtacgagacgacgcccatctcgttgaaaaggagcgggtctgtctggcacgtcttgagcgcactctcaaagtggttcgaagcgatctcgatgttctggagctggaggtgctccatgccgatgtagagcatgggaaggtgcgagctttgaaaacgagtcgggagcatggtgttagcacgcggcttttggcgtgaggggcgggcgacaggctgaagacgcacccttggaagagacgtgcggccgtcgagtaggccgggatggcctggtcgtgctccttctccatcgcaaacgagtgcgcaaaggcgatccaagaagcaccgaagcgagggtccatcaagcttgccttgctgcaagtcggcattacaagggttagcaccagcgagacggggtgaacgcacagcgagagagggcgcacccgaagtagcgccgagcgtcgtcccagcgctcgccggtgaagtaccacagcccgacagcataccacgacgtggcctcgtcgggcgcgctgtcgacgagcgtgtgtgcaagaaggaagagactcgatcgcagccgggggaggtggtgcatgcaggccaggtgcaagggcaacgtcgacgaatgtgacgggtgggccgagagaatcctgcgggcgagggcgacgggagcatcagtctcagcgaggggagagttacgatgagggaggtcagagacgcaccgggtagtgacggcgtagcactcggcccagcggtactgcgcgtaaagagcgtccgcccggccgaaaagcacgtcggcattgtcgcccatcgcatactcgcgctcgagccgtttgcgggcgagcgtgatctcgcggaggtgcttgaactgccgagcgaaacgagaggcgggtcagagccaggccaacaacgccatcagccgaacgcaccttcttcagccggacggtgtagaccatgcggatgaactcggcgcattcgtccgtctgctccttgtagcaaaggccctggatgaagtcccactctaccgtgcagaaagaggcaacggtcagcgggaaaggctttcgctgcgcctcgagcaggtggggccgcaccttcgtcgacgctcatcatctccccgccgacgagcgccagaaacgcgtcgtacgaccggacgtcgagcgcgagcgcctccataaactccactttggcgcgctcggtccggttgatctggaggtaaattgtgccgcgcaggaagcacatggacgcctcgagcttgaagccgccgtccgacttgatgcgggcgccagaggttgcgagatgggcgaacggattcgagttaccgagcgtttcgagggcgtcttggaagaggcccatccgcacctggtcagaggggggcagcacctgtcagcgagacggccagacagcgagagtcgaggcaactctgcgcacctggcactgagcagccagatggcggcacgccaagttggtgtcgatcagccgccgcccgctctcatcatcggccggcttgtgctctgctcggccgaggccctgcgcccagtcaccgccaccgtagcccatagcgcccatctcctcttcctcgtcggatgagtagagcagatccgagtcgtcggccctggctttgcctttgtcgctcgcggagggtggttggctggaccggaggggagagagcagaaggcggagcgcgcgcgagtagtggcccgttaagaagtggatctgagcaagccaaaaggcatcgtacttgtcccctgtaaaggggcggcgggagatgcaaggcatgttcggcgtgagcggctgcgggcccgccttggcgagaatgaccaacacgcacctgtccaggacagcagcttgtcggcccagaacgcggcggactcgtaaagatgctgcatgatggcgtccgtccgccagatgcgcaccttctcgatgagaccctcgtctggcgactcgagctcatcctcctcatcctcctcggcgccctctggcaaaaagccgaggtcaacgccgaggcctgatcgaccgcggacgaacgacgagtcgtcgacgccgatcggggcatgggcggcatcgctgcccaggtcgaccaagctttcgggcccgcccccgaagcggagccgggaccgaacgggcggcgtgccgagagcctgctggccgccgttgaggcctgctggtgcacctcgggctgcgccgagctggaagcctgccggtgaccggccgagctggagggccgaaaggtctgacgagcccgcgccgctcgcgtcgccgaacgacatcgagctcggcctgcgccgacgcccgttgcctcccttggtcgctcggtgtaaggatcgggcggcagtcgtcgtgatccggggcgagcacggcaggagcgacgagttgttggcgccgagctcgtactcgtcgagcgtgagcgagccgccagcgaccgactggtcggcgacgacgccccgcgaggcagcaggcgtcccgggcgcgagctgcaggtggtcgagcagcgagtcgggtccgagcgagaacgaggccgagagcgagtcgcgtcccgacaggaagggatgggcgccggcgccgccgggcccggcctggcgcggcggcggccgattgaaggccggtagcggcggcagacggaacgtttggggcgatgtgagcgccggtggcggtgtgaaggccatggcctgaaggggggaagggagatgtgctccttgagggtcggtgctggttgcgagtcgagctcgttctcgagcggacgcgccagacgacaggtcaggcgcgtgctgcctgcgacctggaagcgtgttggctcctacgtcgacctccttatccacccatctctcgcttgcaccaaatcgacggcggctgcttgtcctctcagctcaggtctgccccttgatctggccggagagcgctgagggaccagaggtacagcgagtcgtcgagggacggagtttacaggcgcgtaacgcgaaccgagtgatagcgtataatagctcattccaggacgcgtcgaaggcgactcgcggacctcgcccctctcctttctcctcgacctgaccaccttacagcatcgcctaccttgaccctcggcatccggcgacagggattccccgagcgtgacgatggccaagcgcccagctccagatcccgagtcggatgacgagatcatcgtcacttcagtccgtcccagccgcatgctcaccccctctcgagctctcgaccgaaggcacgcgcactgacccacactgcctctcacactcgccctcagccgacccagaagtcaaagcaggtccgcatccaggagaacgatgacgacgacgtccaggtgctctcgtcggacgatggtatggacgtcgacgacgcgcccgaggacgatgccgtcaacgaggaacgcatccgagccgaaatccagagccaggcgcagacgaaggagctcggcgtacgtcccgactaatctcagctgagtaaagagggggagaaactgaccagcgactttacgagcaggaggttgccgagatgggcgtcatcaccaaggtcgagctcatcaacttcatgtgccacgacaacctgacgtgcgtcgctccctctctccacccgcgtcggggcctgcggcttcaccccgtccgaactgctgctgacccgatctcctatggctcgtagcgtcaagctcggcccccagatcaacttcctcaccggccacaacggcagtgagtctgggcatctcggtcagctgtcggctcggccagccgccaggcacacgaacgcggcgctcgccgacgctttcgagccagacctgaccgcagccctccgtttctcctcgcaggtggcaagtcggccgtcctgacggccatcaccgtcgctctcggagccaaagcggccgtcaccggtcgtggtgccggcattcgcgccttcatcaagaacgggcaggagtgcatcctccatcgcgtccgggcaacaggggcaccggactgacgtcctcccctgcttcttcgccctccagcgcctgccgtgtcaccgtgacaataaaaaacaagggctttgaagccttccggaaggacctctatggcgactcgatcatcgtcgagcgcaacgtcttccgcgacggaaaagtctctggcggctacaagatcaagagcggcctgacgggcaagattgtttcgaccaagcgcgacgacctcgacgcgatcctcgatcacatgaatatccaggtcgacaacccgatcaacgtcctctcgcaggacgccgcccgagcgttcctcaccaagtcgaacgccaaggccaagtatgacgtgcgatcccgtcttcgacctgcccctgcaagcggcgatgaatccctgacgctctctttttcctccctcgaccccatcctaccccagttcttcctccagggcacgcagctcgcccagctgtcggaagagtacgacctggtccagacgcagatcgacacgatccaggcctcgctccggcagaaggagaccgtcctgcccgagatgaaggagacgatcaaggaggcgaagaagaagatggacgagattacccaggtcgagcgggccgaggagcggctgctgacgctcgagcgtgagatggcctggtgcctcgtcgttcagaaggagcacgagtgccgggccaaggaggccgaagtgcagcaaagccaggatcggctcaagaaggccaagctgtttgtcaagcagggcacggtacgtctccgtcgcaagccttcttcaatatcgcgcgctgatcagcgtccattcttatacaggacaccgagacgaacctcgaggagcaggtcgccgcgctcgagacgatcgccaacgaccaccagcagagtgccgggccgacgtcggatctcctcaaggagagcgagcgggcaatgaaggacttcaagagcgagtaccgatcgtacgacgtgagtcgcttcaactgccggccgttcctgcacgcttgctgacgttcgccgctcgcgtctcgcagagtgaccggagggagctcagccatcagatccagcaggaccggctcgagattgacggcatcgacaaggcgatccgcgaggagcaggccaagcttaacattgatacgagcgaagagaaggcgcggaagctggccgtcatccaggtaagtcgttgcctaggctttccccatcgccctggcgtcatcgctgaccgacctttctcccgccctccaggactacgagaaccaaatcgaaaagatccgcgcccagttcccgcgctacgagcaggagctcgccaacgagaatgacgagcgtgcccgggtcgaggaggaggtccacgaggccgaacaggctgtggagcggcttcagatcgagctgcggaacatgcagggcggcctgcggcggctgcaggagagtcagggcagcggcccgctcggagcctacggcaaggggctcgaccacgttatgcgcgagatcagcaagcgccagtgggtcggcctcaagccgatcggcccgctcggcctctacgtcaagctccgcgacccgagctggcgcgaggtcattgaggctaacctcggccagacgctctcatcctttggcgtcacgcgcggcgaggacgtccgcacgctccgcgacgtcttccgccgctgcatccagccgaacaggggcgtgtgagtcggccgttgcgctcagtactcgggaaagctagctgtctgacgcttcgtcctgccttcttaagcgacttccacgtccgcaacccgcagatcaccgtctatacgcctgatgcaagcaaggcggccgacatcgaccgggccgacctgagcgccaagggctatacgacgatgatgtcggtgctcgacgtgcgtcctccagtcccccctttcgcccgatagatagcgtcgctgatggcttagctcgctcttctccagttcaacaatgaggacgtccgtgcgatcctcgtcgaccgggcctttatcgagcgctcgcccatcacgcgcacgcgcgaggacgccgtccagctcgcccggcgggtcggtgacggcaccaacgtcttcagtcagacgccgctctacaaggccttcacccggtgcgtccgagcctttttgcttgacgaccgaccatccccgaactgattttcgcgcctcgtgctgcgtctttgctccacagccagggcacgcagacgatgaatttcgtcgacaagtgggacaagcccgggctcttctccgacgaccggacaggcgagatcgagtgcgttctctctgtttgcagacacccctgaaagtggactctcaaatcttatcgcccccccctccacccccctttaccagggcgctcaagcgcgacatgctcgatgtcgagggccgctggcgccaggcaaagcagacgcgggacgagctccgcagccagctgcagcagatcaacggccacatccgcgagatccagacggtgcgcgcagtcgcgtctgtggcgatccagacgagccgctgctgacaggttttctcgctccctcgcacccttcaggacaaaatcctgcggctccaaaacgcgctgaagcagcgcgaacgcaagctcgccgacgcgcacgaggccaaccgcgaggaggcgccgccaaacatcgccgcgatggaggagcggctcgaggtgcgttgctcggggctttcctcggcatgcccgcccggttgctgatcatcttcttttcacctcgtacttctcaagggtaagcgcgcagcgctccagacgtccgagggccagctggccgacctgcaggctgcgatcgagcgccttcaggaggagaaccggccgctgcgcgacgagattgagcggctcaagaacgagatcgacgaccactcggccaagtaccggacctacgccgtgcgtctcgcggttgcgaccgctgacctgcaggcacgccgaaatgctgacacgtcgttcacaaaacagactgagctcgtctcgctgcaaaagaagctcaccaaggccaagtcggacaagaggcactacgcctcgaagcaggcagaagaggaagagaagcttgagaagctcgcggtcgagctcgacgagctgcaaagtcttgtcgaggcctggaccgatgatgtcgtacgtttccatctacttgcttgcccctcgatagccgaggctgaccgcctcgcttcctttgcctccttggcgaccacagataaaggtccacccaatccgggtcgaggtccagccgcaccagacgcgcgactcgctccagaaggcgatcgacggccaacagaagatcatcgaccgccaggtccagagtgccggcatgtcaatggacgaggcgcagggccattatgaccgggccaagaaggcctacgactcggccaagaaggaggtgaccgagatgaagagtctcctcgtcgtgcgtgcccattctctcgctccgccctgctgcgatcgaaagctgaccccctttgactcttgcaggcgcttctctcggccctccagctgcgcagcacaaagtggcacacgttccggcgctacattgccgtccgggccaaggtcactttccagcagcacctccaggtccgcggcttcctcggcaagatcatctttgatcacgagaagggcacgctcgctctccgagtacgtcacggctcctccaatctcgacctgtactgtttttgacgctgacccccgtccgtctgcggcctcgcctttctccaccagatccagaccgacgacctgcagacgacgcaggagggctcgcgcgacaaggaccccaagcagctctcaggcggcgagaagtcgttctcgacggtcgcgctcctgctctcgctttgggacgctgtcggctgcccgatccggtgtcttgacgagtttgacgtctttatggacgccgtcgtccgccggcagacgctcaacatgatgatggacgtcgctcagtgcgtgtcggccgttccttctcctcccggcctagggtcccagcagtcactgacgcctgccgactcttctttctcacaggcggtcagacggcacgcagtatgtgctaatcacgccgcaagacatgtcgggcgtccggacaggcccggccgttcgcatccacaagatgcgcgacccagagcggtgcgtcctctcggctttttgcagcaaccattctccgccgaacgctgactttccgccccgctccctccagactcgacaaccagtcgcggctcaacttcgccgccgagtaatcgccttgcctcttgacccgctccacgtttccagaccgacctcccgatcggcctcttcctgcctcttcctgacttcctcatgcccgccacgaatgtctctcgcacgcgccgctccctcacgccgcctcccatcttgtactcactcagcatctcgcagctcccaccttcgactttgttttcttcctcccttcactccgcatctatgctttctcccaccctgacctgctggtggaagccgtgtgacgggcgcgtgactgccttcatgcggatcgggcgtgctgcgccgcgtctcttgttcgcgccgcgccgagcgagcgaagcaacagactcgcactgacctcgaccgtcttgaactctccctctcgcactctcctagagcaccacagcagctcagcagaccctcgtcagcctcttcttcccttccgcccttccagtctcctccgaacagctcgactcgctcagccagcacggccaccgctccccgcccgcgcagcctcgcttccccccgacctcgtccttccgccgttcagcctcccaccgtcccagctcgatgctctccttcgccacgctcactctcctcgcgctcgccggcagcgcagcagccgagaggcctcactggtcgacctcgaagtacgcttcgcccccggcaaagcgggcgacgggtgcgtctgttgttcctctctcgcagccgattgggctgccgccaaggacgcgctgtgctgacctctacttgcctcgtccagtctgcaacggccacgccgagctctgcgagaggcgctacggaggcgtcagctttgtcggcgcgcatgactcttgtgagtcgccttgaagacccttagaaccggaggtgcgggtgcggcggtgcagaggcgtgacggctggtggtcaccgagcgggctggcgtaagcctcccttggctggcacatcgcctctggctgcagctcagtacgactgcggagggtggtggagagctggccggagcgttcatgcgccccgggacgcggttggctactccgggtgctctgttgcgctcgccccctccaggccaagccgcaggctgacgtccccccttcttcgacagacgccgttgggacgaccaacatagccgccaaccaggatcacgacgtgacgacgcagctggtcagtgtgccgtcgagcgcaccctgtctgacgactgtcgctgaccctcgctctctgctgtcagaacgacggcatccggatgcttcaggtgcaagcccactggtctggcggcgctctgcgcctctgccactcgtcctgcgtacgtcctcgcgcatcgtcgtcaagagaaagttcctgacgagcccctaccctggcctgcttgacccagttcctcctggatgccggcactctgacgtcgtacctgacgacggtcaacacctgggcggtcgccaaccccagcgaggtcctctcgatcctcatcgtcaacatcgacaacgtcaacgcctcgacggtcgccgagtcgtacacttcgagcgggctcgaccagatctcgttcgtaccagagagggcgacgctcagccagagcgagtggccgacgctcggcagcatgatcgacagcagcaagcgggtcgttaccttcatggacaagtcagtttgccgtcactcgcagaccttttcattgaagcatcgactgactatactttggtggtcctttgcagcacggccgacttcacgacggtcccgtacatcattgacgagttcgccaacgtcttcgagggtgcggccgtcatcccccctctctcgccgccgatcgactctgctgactggtttttcctgtctgcacactcccacagacgcgtacaacgtcatctctgacgaatttgactgcgccgccaaccgttcaacgggcgacccgagcacccagctcatgctgacgaaccactacctcaacactgtgcgccgccgctgccgtccctcttgctgcccgacccgagtgccggactgactgaccgaggtgcatcttcgctgctgcagctgggtgcgacgaccggcttcctcacgccagacaagtcgcaggtcgtccggatgtgcgtcagctccaaccgcgcttctgccttgaccacgcgctgaccggctatctggtgcgctcactttcagtaacggtctgaacgggacgggaagtcttggccagggcgccgacaactgcaacgaccgctggggccgctacccaaagtgagtctcgaccgactgctctccctcaacatcgcgcatctgaccggcgagcgatccccttcgctcgcgacagcttcatgctcgttgacttctacacctcgtcctcgggcgacgtctttgacgttgccgcccggctcaatggcgtctcggcaccgacaaacgagattgcgccctacctcgccggcacgtcgaccaacacgacgacgactggcagcgggtcgggctcgggtgtcacgagcgtaccccttagtcacggccggcggacggttggtggcctcgtcgagggcagcgtgctcgtcgccagcctggtcgcgctcggtctcgctggcggggcgtcgatcctcctctgagctggtctcgaggacatgcacactcgggctttgctcacccgtgagcatcttcctggccttgcacgtctgctttgcgcaccttattgctccgactctcgcttgtactcgcatcaaagaccgccgacgctccgaccatgtgacgctctttactgctcctcgtcgcctctgtacctgtatcgccatttcaacccgccctttaggtcgtttccagagcgaccggcagccgggctggcgggatcagctcggaggatgactgagcctcagtctgtacgagcgaggatggtcgaggtcgaggtcgtctatggcctgatgtcgacgactgacttgtgcgaggggggcttccgattgtgcgcgccgcggcgcccccgctgtcgccgacgtacgtcttccgttgcgctttcgccttccctcgccctcgacctcgacagctactggtcatagcaagccagtacgtgatggacaccttcgagaccgccgcctgatgaggagttgaactctcgctgcctctgctttcctcccgtgtcgcaggctctgcctgcctgcaagtcggcgacgcgtacgactgcgcctcgaccccctcttaaaatgaacacgagcctcgccgcccacctgttccaatctgccctccttctcgacgagtctgtccagccctttaaactgaagcagagagaagcagctgattgtctaattctaacaactcagggtcgccggcccggccgacctcgggcccatcgccgttttgacctctgcggccgcccccgcggctccgtcgccgacactgctgtcgccgcactcggcctggcaggactcgcggaacgaccttctcctgacctgcggcccacctggcagacttgtgagcttcccgtttcgcagttcatacctcgcggccgcctcggttttctaggaggacctgttcgagggcgagctcatcggcgcgcccgagcgcactgccaagggcaagcccgccatcatccctctcgccgccggcgacgagccgaaagcggtcgagctcttcctgctcttctcgtacccgcgggccgtcaagccggagctggcaacattcgacgagctgcagaggtcagccgctccttgaggtcgatcccggatcgagccgcagggctgacccttgtcccctttatcccacgcttttcgccagcttctgcgcccaggccgacaaatggcaggcgccaggcgtcgcctatgccgcgctcgagaaggcccaccgcgtcagacgcccggcctcctcgacgactcgggcgagaacctgccgcctggctcaaaaaccagcgcctctgaagacagcctggttgccgctggtccggcctcctctttcaataacgcatgtcgcttcctctgtggaaccgaaggaggctgtcagaagcgggacgtcatcagaaagcatatgcccgacgcctggacgaggcgccggaaagggagaaggcatggggtgaggagaggacgtgaagattgcgcgtgtcgtcgtaaggtaggttgagcttcagagactaggcgctggacggggaccgaggtgctcaatcgacttcgatgacctcaatggcaaccctgcgccgaggccgaccgaccgggccgcaagggacgacgccggccgcctcgagtacgccgtcgcgcgcattggccgtctcggcgcgcccgagcgcacggcccgcgctgccagcggcgcccttcgtcagcacagcagacgcgagcacgagcttggccggcgctgggcggaccatgaacggtgactgagtgacgggtgtccctggcgggcgcttgcgcgcgccgttcgcggtcgaaggtagggctgcccggggcgtcgcgtgcagcgaccctggcgtcggcccgcgcgacttgaactgaggaggcgggagtcggcgcggagtcgaacttgcaccaattgaagggagagctgcaaaacggccgagcggcgagagcttgacggcgcccgtgatgtcgtcctgctcgacgaggaggacgtcgtcgtccgagttctcgtcgtcgtcgctgtcgtccgagtaggcccggcctttgcccttgcccgtctcgccggcaagccgctgccgctttttcgggctcttcgatccctcggcctggcgaaccgagaaggcggtgggcggggcgagcggggcgaggtaggctggcacgttgacggcgcgctgggccggcgaaaggacgtgcgccggcgccgaagcgggcgaggagagcatcggaaggggcgatgacggcgttggcgccagtggcctgggcgcggccgacagagggcgcgaggccttcgcaatgctggggctgagcgtcgacgaagacggccgcgtcgaaagcggcgtcgctgagcgctttgtcacgagcggtgccggaattgcccggggcgtgccagatggtccggcactcggtgcggaagcgagcgcctccgcctccttcttggctttgctgccgactgccgccttcgcctttgatttgcccgcgacagccgccgccgccgccgccggcttgaccgccttaccgagcccggccagcgtcgactgggcctcaaagtcgcggccgcgcacgcgccgccactcgcgctcgacgccgtcgacccagtcgtcgcagtcgccctcgacccaggcatcaaaaacgccgtcccactccttgcccggcgccgtcttattgacaaagatgacgcggcccttgccgccctcgggccggagcttggtcgccgggagcgagtggacggccttggcgagttccttgacgagccgcttgaggccgtggaccttgagcgaggtgccgaggacgagaaggaggtcgggcgcgcgctgaatatcgtacgactggagcgaaccaatcaggtcgcccgatgggtggttctgcgaagttaaggcgccggtcagtcggagtggacaagtgggacgcagccttcgcgctcgggacgcacctcgtcgtaaagaacgatgcctggccgaaggacgccctggcttagtgcccgctggccgcgagcgacacgctggccgacgcggtcctcgcacgccgggcagttgacgcactcgccctctttgtagagctcgacccactcggacgaaaaggcgtaggaggccgcgcaaacggtgcagcggagcgcgtggatgtcgccgtggagttgaacgtttttcgtcgaccgcttatcgagttcgggcggagggatgcgggtcccgacgggcagggcggcaggcggggccggcgaggaagggacgctgttggccgccggcgagacggcggtcgaggtcgaggctgtcgggttgctcgacggcggcggcgagggcgagcgtgacgaggcctgcgacgagagcgacgacgaccaggccgaggtcgtcgccaacgatggctcagaggaggtcgcgctcggcccctcggccttgacggcgaacggcgcagggagagtcgacgagcaccggacgccagcccggcgctcgagcccatcaatgttttgcgtgtagctccgggcgagcttgccgcgctcctcgagccggcggacaaagcggtgcgtccggctcggctcgacgaggtcgacggcggccttgagctcggcaacgaacgagaagaagagcgaggttgactcgggggagcggaagagaccggaagagaagagatccttgccctggacgactgtcgacgggtagcgcgccttgacgaggttgtagaggccgtcggccgagcgaaagtcctgccgggcgaggggcgagggagcagggagacggtcagcacgggcccgcatcggggcgggggcgcggtcaggcactgtcgttcggctgcgcagagcccaggagtcgctcgaatgaggctgcaatcatgcatgacaggcaggcacgtatatgccagcgacgagcgcacagacagccagaccacactggtacgaggacgcaagcagtccatccggcgtctcttcgtcgcccgacttcactcaacatctaccgcactgcgcgcccccgcgaaggcgacgccagctgcctctggaccacccttcgaaccatccgaaaatacccagacgcgcagcacgactggccgagtcgtatagagcgagaaaaaggacgtaccgggatgccacagctgcagctgacgccggcgcccgagacgacgacgaccttgccggcctttgcgaccaggctgccgatcgcggcgagctggcgacgaacgacagccgcggccgggtcgtcggtcgcgtgctgggctgcgagcgggaggtggagcatcgccaggatggcgtgccttgcttcgtatgaaagggtcgacctgtatgaaagagggaggatgaagtaaccgagtcgtcaaggggggcaggaggggaggaagaaggcgcggcgcggtcaggggctggctcgatgcttgagggcagggatgatgcatttcgcccgactacgccgcctgacgacgccgtgtcgcctcgactggatcgcctcgccttcccaacccgcaccctctgtcgccctcacagccgaccccatctcagcatcatgccagccgaagacgacctgcaatgggttgaggcgccatccgctcggccctcccgcgagtcgcgcgcgacatcggcaacctcgtcctcccgccgcgaccgagaacgcgactcacaccgccgacgctcgcggtcgccggccgccaacgacgatgacgaccgccggcggtcgtccgaccggcgaggcgagcgcgacggcgatgggcaccggtcgaggcgcgacgaccgctaccgcgagtacgagcgcgaccgtagcgatcgggaccggcggagcgggcgggaccggagccggtcgcgcgagcgcctgcaccgcagcagtcggcgtgacgacgacgacgacgaccggaggggcgagcggagggacgacagggaccgccatggtcgctcaagtcgacgttggtcgaggtctcgctctcgctctcgcggacgtggatccgagtgcgtcccagaccctcgtttccgcttgacgcgcgaccgttgccgaccccacttggctggcctttggctcgcgtggaagcccacgccgatggctaatcgctgaccggatctcctcacctatgcccccgttttcagctctgaatcgggcggatccgactcggacgtgtccgagacgcgctctgagcgcaaggcgcgcaagcgtgagaagaaggagcgccgcgagcgcaagaaggagaagaaggtgcgtccccaagcccaggggtcactgctagcgatgctcgaagcgaggagatgctattgctcggaccgctgacgcgtctctgacccctctggcttcaggagaagaagaaggcggccagcacgattggcgaatggggaaagtatggcctgatcgacgacaacgagtacgtcgcgcgcgaccttctccagcctccgctgatcgatgggacactgacaccgacactttgttgtcctgcagccgccaggacaaggagaacgagttccggtcgtggatggtcgaggagcgcaagatcaacccagagacggtcaagaaggacaaggagaagaaggagtggtcggtctacgtcgaggacttcaacacgggtgagtctgaacttgcttgaaaggcgtctcttggtcgaccagctgctgactggcgccgctcaccctttcgtccagccacgctgccgcacgagaagtactacaatatggccgccttcatggccaagatggacgcgatccggaccggcggggcctacacgtcgtttgatggcgttgcctcgtacgacccttcgaaggacatggcctcgcatgcgagctcgctccggcggccagtcgtcgagaccgagacgtacctctcgcaggcccagctggccgagctccggcgcgtccagaatgagcggatcgagatgggcaagcgcaagacgctcgggcttgaggtcaagcgcgacctcggcgtccggatggacggcagcagtacgtcagctctcgaccttggcgtcctgtcgcgcctgtctgtcctcgctgactttgcttcctgcactcggcagagttcgacaagcgctgagcagcgccacccactgtgcaggatgtcagtgcgaaatctcatgcgcgcctctttccatcacgacttgccatgactcgtttgagacggtttgctgcaggctgccgggtcggaggcagcgatattcgcctccggctgaaacgacagccgcgcagcacgcccgccatcgaacgcatcaacggcgagccgcctctcctctctgacttcaacatgctctgagatcgagctggctctgccttctgtggcgccgcttcggccgctcagctgtctactggtttgaaagggtcgctggcccacctttcggccggtcgctccgcctgcagcagcccctgtctcgagcgctcgactgacagcccctgtgaccgttgagcttttgcccctcccgtcttcccatcttgccctcgcccgccaccgacgacctgctcaaaagctttccttgacgccgcactcccagtcgaccttcgtcagctccttttcaaccagccatggcacgcctgacccgatccgctgccgccgcccgcgtgactgccgcccccccgaccggcccagcagccagcagctccgccagcacaagctcggccaactcggccctacctgccgcagtcgtcgttgcgggctgtcgcgtctgtctcaagggcctcaagctcgtctttatcggcgggctgcggacgctcgctcgcccggacgcagtggctctggcgcgcaagcacggcgcgtgcgtcccttcttgacttgctaaacccgatcatctccctcgcgctgacgcgcctgccgtcactcatacttggcagtaagctcaccaaggccacttcagcagctacctcgttcgtcgccattggcaaagcagcgccgccccgcctcgtacgggccgaccggggcctaccgacgctcgatgaggctggcatcctccatttcatccggacccgaggcgtcccggacctcagccggctttcgtcgactggcaccttcaccgcttgcgtatgggtcgagaatgcgctgccggcccaagtaactgcgagcccttcaacggcgggccgagggttgcccgatcaaagggagggctcggcgccgctctcttttccgccgccgcttcgaccgtcctcctcgagcccttcgcctttggtggaaaccgctcttccccacattcgcctgcccgtcaagcgtcggtcggattcagcggactcggagcggggacgctgacgtcgcatcccgcgtcctgaagacgacgtcaaagacgtcgaccttgttgtcgtctcgggcagcaccggctccgcccagtcaggcgtcctgcagtcctcgtcatccgacatcgtcttcacgtcttcccgtgtgcatctaccgccgccgacccggtcaccgaccatcgctctctgacgcggtccgtcagcaactgtcagcgctgtcggtatcaagcggcgcgcaatctcaaccaacgaccgccggtccggcctgggtgccaaacgccggacgtcggcaagattcagccggtcgtactcgaggtggcgggcgctgtcaggccgaagcgcaaggtggccgttgtcgagctgtcgtccgactgacggcgccgacgaggggttagatgggtcggctgcagggtacgcatcgatctgggtgaggagaccgatccagccttgaccatcgaaatctctcgcgcttggtcgctcagctgccttgaatcgcatctcctttctacaagtgctgcgtcgagggaggaagaagttggggtagagatctccctacgcgcctgcagcgccctcgagtgttgcacgcgtcacgctgccggcctcgtccgacggccgggtgaagaggggaagatgccgtcctgacctcgttgagccttcgacgtcaacctcgatttcttcactgacagctatccacgccggttctctaagcccatccttgccatgccctcctccaacgccgatgaggcgccgctcctcccaagccacgtccgccgccagagccggcgtgtcaagcttggcattctgctcgccgcctttgcaacgctcgccatcatcgccgtcagcattacgctgacgagcaagctcgtcgacagcgacccggatggccctgaggatccgctcgagcgcgcccactggcttttgaagcggtacgtacagcgataagttcaactcgtgctcaagggaagctcgctcgggcacctgctgatggctctcgtcttgctccgaagctcgctcgggcacctgctgatggctctcgtcttgctccccccttccctcgcccttcctctccagaaccaaaacgccgatcatcgatggccacatcgacctgccagagtttgctaggatgacctacaagaacaacatctctgcctttgacctcaacgagccgacgcccggtcacgttgacatcccccgcctccgcgagggccaagttggaggcttcttctggtcgtgcttcacccagtgccctgccgatccgaagggcggcgtcgggtcggacgacttcctcacggcacacaacgccgtgcgaggtgcggctcagtctctgcgctcctttcgcctaacacgacgctgacaatccgaatggtttcttccgcagacaccctcgagcagattgacgtctcgaagctcctcatcgagaagtacagcgacacattcgctcttgcaacgactgcccaggaggtccgagacgcgacggcaagcggcaaaattgcgtcgctgctcggaattgaggggtgcgttcaggtctgagattgcgcacttgcctagggtctgacgctctcgacgctcctcaaacagtgctcatcagctcggcaactcgctcgcctccatccgcatgtatgccgagctcggcgtccgctgtgtgtcttccgtctttcttgacagagggaggtgctgcgctgatgcctcgtgccttccgtccagacgtgacgctcacccattcgtgccccaatgtctttgcggactcggccggcatcttttcgcctgctgtaaaggttcacggcggtctgtcgcctcttggccgggacctcatctatgagctcaaccgactgggcgtcatggtcgacttgtcgcatgtctcggacgagacggccgagcaggcgctcgatttgacgcgcgcacccgtcatctggtcgcattctagtgcccggcacttcaacaagatccagcgcaacgtgcccgatcatctgctcgagcgcctcggcaccggcgagagcaaggtcgacggcgttgtccacgtcaacttctatggcggcttccttctcggcaagggccagaagggcgacgttgcgacggtcgccgatcacgtcgagtggatcgcgaagaaggccggccacaagcacgtcggcctcgggagcgactatgacggcatcgagagcacgcctgtcggtcttgaagacgtctccaagtacccggccctctttgccgagctcatccggcgcggctggaccgacgcccagctcgagggcctcgccggcggcaacacgctccgcatcctcgagggcgtcgagcgcgtccaggccgagatgaaggacgagccggcgagcatggcgcgctacacccggcgcaaggacctgtagggaaggcgtgcgatgagcaggccgcggcgcagggaaggagggcgcaatcttcttgctaggaatgactgtcagcaaactgcagcccagctgttcatttagtcggcacgccgcatgcaatcacactgaggcgtcgccatcgctctcccggtgttcgggatcctcgtcctcgccgtcaaagtccccgtccacgacatcttcgctcccatcgccctcgctctcatcatcgtcgtcgtcgctctcgtcgtcgaggccctcgatctcgagcgcgccaaacatgctgccgacgttggctttcgcttttttgctgacgagtcccgccggctcgtcctcgtccgggtagtcatccgagtcaacctctgatgcattgtccgactcatcctcgtcctcgtcgaacgactcgctcgcctcgtccgagctgagttcgtgcagggcgtccgtctgcagcgggtcgctggcctggtggaagggcgagtattcccggccgagccagatgccatcgcctggcgggggggtggtcgctttctcaccgccgctcactggcggcgggcggaacgaccaagggatgcgagcctcagcaatggcccggaggactggtgcgacgagacgggtcaaggatcaatttagcatccgagcaagacttgattcagggcgacaacggactgactgtggttgccggctcggttgacgtctggccgaccagctttggccgtcactggggtaaaggatggggtcagcgattgcctgcgagaggccatgcctgggcgaccgcttttactcacggaagccgcgctgaagcgcccagccctccatgatgtcgcccgttgaccagatcttctcgcgcttggccggcttctcgtccgcatcggccgggcgcatgcctgcccgccatgtctttttggcctcgacgacctgggcgtcatcgtcgaggtcgtcgagctggaggatccgctcgagcggcaagagctggcctgcaagctgcaacacggccggaagagccgggatgtgcgagattggcaagatcgacgagacggcttgcagctcaaagggcgtcagagacgggaggacgaggccgggcgagtcggcaagtcggacctgagcagcgaccggagctggtcagtcttctggaagcagagcgagtctagctcagaggaaatgcacctcgggcgtccagaagatagtctggaagtgcttcgtctttcccggcgtcttagaggcgcggactttgcttttgccgaccatggcattcaggagcgagctcttgccaacgttcggctgcctgcaatcgcagaggcgacaattcaaaggtcattgacgaccatcgaccgcccagatacgcacggcatgacgcaccctatgagtccgacggtcaggtaatcaaagttgaggtgttcggccggcccctcgccgacgcggccgtcagccctctgatcgtcgtcctctatcggccgcggctcgtgctcctctccggcaggcgtctcgccgtcgatgggcaggccttttacgagcttgtcccagtcgatcgaggagcgcacgcgaggcgtccattttgcgagcctcgctggatcctcggcaacggccggcggtggggtgataagccgggcgtgcgcgcgcttgatcgcctcgacgaggttgacgagcgagctcggcggaatgtacgacttgagaacagatcgggtgcctgtagcggatggagtcaaagtctggtcaagaagatgacggcgtcaacagggggaggagcaagcaagacggaccctgcgcgcgcttctcgcgccggtaggcctcgagcgagacgatgtcccagccgtgctttccccactcgcgccggcaccaggcctcccactgctgtcgaacgtcagacgagacaaggtcgcatttggtgaggacgaggacgacctccttccggctcgtctgctgatgcgataggatgtactcctgaagcgacggcggaaagtgcagcggcgggcagcggatgtcgatgaggaccaagaggatcggcgagagctcaagcgtccgccacagctgccggtagacctcgaggttgcgctcgaagtaagtcgtcgaccgcggccactggatcgacgacgacgacgatgatgaggcatcgactccgggctcggttgtgacggcatcaggatcggaaccgtcaccgcctggctgctggggagcgatggcacgccagcgctcgacggcgtcgtcggcggctacaagccacttcttgaagaggccggcctcgttggcctcgacctccttcttggtctgctcgtacttccactttggcctgcgcgggatcgacaatgcctccttcattgcctgcgcaggctcgagcagctcgagcggaaagtagggcgcgtcggccgagatcgggcgtggtagaggatccgtcagggccgtcgtcttggagcgcgcgatgtactgcgaggtcaaacgagaaagaaggagccggccgaagtcagtttggatcgaccgtcgagaggagctggctgctgcggccccctccttgcacgagcagctccgagggagactgacctcgggcgtcagaggcaggaacttagagatgagcttgcgcttctcggccattgctccggccggctctcgacccgaccgaccctggccagagactggcgcatggttcgtgagcttcttcatgccggccgcggtgaagccggtcggcggtggcggcagatcgccccgcttgaccgcccgtttctccttgagctgtgctggaggaacgaagcaggcgcgtcgaccgtcagcttcaaggctgatcagcagggctcccaaagcgcttctacggacccttgcgctgtctgagggggtcagacggccggaggcgacgtcagcgcacgaggtcgaggtcgctggccgagtcgggagctcaccgctgcagcacccgtcggcagagactcactttgtgctgcgagcgacctttcgaggcatggtgggcgggccgcgggcgctaagggagctgttaaagcggcgtctgctgcagagagagtcggcgtcgtcgttgtgcgggagttcagggctgctcccggatcgaaatcgattcgatctctctcgcgcaggatgacgcgtctggcggtgcccgagcagcggcgctggaagtcatacacacaggaggcacttccggcgctcttttccgcgcaaggggcagagaagaggcggtccttcagggaaggttcatgtgaaaagtcggcagtcggattcaagaaagacgacttaggggtgagagcgcaagtctgaaagcattcgacaggcgggcccggcacatcgtcggaggtcgacagcacctctttcgataagtgaagcctctgggcggcaaatgctctgagtgggaacagtagctcagcccgtcagagacttctcagctgctcttcaaggatcaggttcagggcgccggtgcgatcagcttgtctgctgcgcggaagcggtcggaccgaagcgcccaagctgcagccagaggcaccgagcattcagcgcagaaaagagctgatgctcgaggcgaccgccgagtcgctagacgtctaccgagcgggtcgagtgaaggccggtcatgcgctgagcgatgatctcttggctgaggcacgtcacgcccgcgagcaccgacaagcgggcggacggaccgcaggcaaacccgctgggctctgtccaggaggtcagccgctgctgatgtaggcctggtcaagtcagtcaaggtcagtgaacgctttctcaggacgagtgagccagatgatcggaggtcgacgtcagttgctgctcgccgagcctgcgagcgagctggccgagacgaggtcgacgcgccaagttgccagcctctctcacctgccgcccaacgccgacctgttccctggccctccttcgaccccagctcgacctagacgcgctacgaccgacggcgcaggatggaggtcgatctcgactcgacgacacaaggcacctttttcatcccttgcaagaagcggcggcgcgaggaggcagagctcccgcccgaggaggccgcagtaccggagcccagcgcttggacccaggccgccttcgataagagctgggcgaagcatcaggcacggatcgctgtgcgttcttctcgagccatctctggtggaggagagagctcttactgactgctccactcgcccctgcttcaggacaccctcaagcgcctgacgaaatggtcgtcggagcagctcgtcggttgggagtccgagagctacgcggccggcgagcctcgcaagccgtacgcatcgatcccgacagcgctcgtctcctgtaggtcttgcggcaatgagctgcgagcatagacctcgccaatgctgacctgcgagcctgccggctctctcagcgacaagcgtccagacgttacactcgctggtcgcgaccgtcgagcagctgctcgaggccaagcgcaaggccgtcaagggcaagggcaaggagcccgctggccggtccgactcgacgataggggatgtcgagatggcggacgatctcgcagctccaagcgagccagagagccgtcggacggtcatcgagtgcaagacggggacgtcgctcgagacgctcgtcgagagcatcgtcctcgggctgctcggcgacgactcggcgaccggcagcgtgcgcagacctcctgacgatcaacacgagatgtcggccgctggctgaactcacttccttcttactttttacctcaacagacgccgacactgccctcgctcttgcgcttccaggagacccagacgcggctgtcgatcacgctgcaccagatccacctgctcccgctgcgcaccctgacggccctcctcacggtcctcacgcgctactcgcctcggctccggctcgtgctcatcctgacgactgcgagcgcacctggcatcctgggcgaggttgttccggccgccatcatggaggcgctcgagatgcgcgtcttcgacggcgtcgagggcggtgacgtgtgggaggaggtcgtcaaggatgtgcatcgcctgcgctcgacggcccttctggcctgcagtattcttcgacagctgacatctagtcactccgacacagctttatttctccagctgggaacctgaggtcctgatcgatggtgcgacctttgacgagctgcgcgacacgtacgagcgcagctcgcactcggtcgagggtctcatctcggcgctccacgtccgtctttccgaccttctgaatgatggccattgttcgaagactgatcttcctgcgctctcaaagtacattcacatgcgcgccttcttcggccccctcggacaattcatccctcgaccgccgccggcaagcactgggtctgccggcacgtctgcgccgccagacctgtatacagaggccgagcagcaaaagatcttcaagcgcctgctcgtgctgccctcggtgctccaatcgtcactcgccaggtcgaacccggcccttcagccaccgctcgcgctgctgctcgagtcaaccgagctcggtggcgcgcatgcccacatcccgccggccgctttcccgcgggacctcgtcgcagcgtcgcacaagctcgtgcacaagcacgcagccgaccggcggctcgcgtttgcgatctttgcgagcgtccgcaactatctcgccggccggagagacgacggcggagcggccggcggcagcacgggcgtcatgcgcgtccgcgcccttgagggcgtcaggctgatgcggtcggtcgtcaacggcgaggcgagcgggaccgatcggggctacgtctggacgacaaagctcgttgcgtgcgtatcacgctgcccttggcgcttgtcctttgcactccattgctgacgactagcttcctcgagatttgcagcaagctctcggtctccgagttgccgcgactgatggacaacatcaaggccggcattcagccctttggcatgtttcggatcagcgccatcttttccgagctcaacaaggtcaaggagagcccgtcacagacggctgcggctctcgagggcttcttcaggtacgtccgagctttcatcccttagcgcctatacgctgaccctctctcccttctcggcgggccgcagcaaatggatcactcgtcacgagcgcgttctcttccacgagctctactacttccgcgacctgcgtgatctcatcaaggtcagcgcggcgaggtttgatgggcacacgagccacgctgaccgtatttcccaacctcgccaggtcttccgcccggcaccgctcgaagcgctgcaaacggcgcttctgtcgccgcagacatatctcggcaagtcgtcgtgcgacccgaccaacgtgacgacgatgcccgacacgacgctcctcttcatgcgctacctcgagtcgggcaagatgatcaacctctacgactggttcgaggccttttcgtcgacactccaggtgccgcccccgacagacgccgacaatgaggcccagatcgagcgtcggcgcgaggtccaggcgcgctttatgcgcggcttccaccagctcgactatctcggcctgcttaagggcacgaagcgcaagcccgaccatgtcctcaagacggtcttcatggttggcgaggatgacggcgaggccttccttgaaggtcagcgggcgggcgcgcaggcttcggccgatgcctagttggcagggagggagaggttggggctcgtatgcccatgctctagccgaccgaccgactgacaaggctgcaacctccgaggctcagcagctgacgactctggctcacgcgaccgagcgccaagactgtccgcgaaagcaggggccggcgagaccatgcccggaatcgccggcgatcgtgctgatccggccggccggccgaccgacctcgccgtcatggatcgttctggccctcgagagctctcgtcgacgacgctcagctcgaactcctccttcttccacctgcctctcacttcctctggcagctcgtcttgtctgctggccgcgaccgtcacgccagccgatgcgctccgactcgctgcctcggttcgcgccggcccctttcgccccggcgcttgtcccggaaacgccggcactcctcaccccgcctccgaggtcgatctctactggcgccactgcgtcgccaagaatagggtcgaagggcagcagcagtggaccgagctcagtcgtcggaggtggcaacgtgcgtacgaggactcagaaccgttcgtaggtcgagtgctaggctgacgccttcctcccttggacgcagccgcccgtcgctgccggcccgtcgtcgcctccgacggagtcgctctacgagccacacggcctcttcatcgccaagtacgcttgctcacctccttcccttgacgttgacaagcaggcgctgactcggcctgacctccctgctctagcctgccgcagggctcgaccgacgccgtcctgcgccaggcgctcaactaccatttcagccgcttcggcaccgtcgcctcggtcaagatcaagcgggaaaaagatgtccggccggtcgcggcccggaaaaaggagggagacgtttgggcttggctctcgctcgcggtaagtcctgctcatgcctctctgtcgctttggctcgtctgaccggcgatctttgctgcgcagacgccagagcaggcaacgacggccctccgcggcgcgcagggcatccgcgtcctcggccgcacgcttcgggtcgagcgcgcaaaggcgcaccgcatcattttgctcgagtcgcgcggtcatgcgaccttcgtaccgtcggctgccggcggctggctcgtccgcacgactacgggcgactttgtgcgggccctttgcggctctcgttggcgcgaagcctttcagctgacacgaaggtttgcccttgcaggacctggccgagctgctcggaggtgacggcagcaagccgagcattgagacgcggcgcaacggcggtggcctcctgctcaaatttggccaggtgcgtgtagcccagatttgcgtcgtccgagcctaactcttctgatcggactctgaatgctcgtcttctcgtgacagggcgacggccccggtcttctcgaggttcgctgccttcggctttagtctgactgtgcagaaactgacccgacagcctctgcagcgcttgaacgccaacgtgcacctctcggctataatgtgcgtttcccgtccacgtgcagcgcatcgcagcctgctcgatcctgacttgcgtcctcctcaatcaggtacgtcgaggaccacaccgtcgctgctggcaccgctcgccggtcgctgcctgccttctcgtcgtccccgatgctgcagcgcgcgccaaacggctttggctctgccgagcggggccgtacgcggcatcggcagggcgcacttgcgacccaggacggacgagccgagcgtgccaagctaggccggccggccggctcgcccgagcaggcgtggttcggccttcgcatcgccatccctacgccgccgcgctttcagcagatatcgccggtccagcagtcgacctttggccatcctgtcgatcacgcccctgccggtcaggtcagtcgctcgcccgggccgcgaatctctcttcgtattctttcactgaaagccctcgttactcttccacgggccctgtcgcagacaacgcgcaccggcgccgaggtcatcgacggcgcgtacggttcgtatcacaaccacttggcgcccgctccagtcgactcccaccgccctggcgtgcagccaggcttcagccctgccgcccgtgtcacgccgttctccgaaccgcttgactcgcgcttcggctcggtcgacccgagcttctaccatcacccgccgacacctttccttggcctaccgacgtcgccactcagcccgttcctcccggtccactggcccgcttacggctcgctgcccgcgtcacctggcgtcagtggcttagctcgcctccattgcgcccgcctgctgacgttccccttctcgtcctctctcggcagatttggccataccgtgctcctcggccgttctccagcgtccgcccccgcgaagactcgcccggctggattcaggagccgcagacgactgacgcctcgccagatgcgggcacgacgtcgtcttggccgggccacctgtccctcgtgcagcgactgccttccatgctgggcgggttcttcctccaggcggggcggccgccgccttcgttcagcggcccgccgacggaccggcggctcatgcacgccggcttcttgcccatgccgcttgcgccgccgttctggccggatggcggcggcttcgcgacgccgtggcataacggccgccatagcttctccgagccgaccttccctcctgtccccggcccgtctgcgccggcgcatgactggcgggcgcaggcggacggccacgcctaccatcagccatcaacgatgccctctgctcctccgcccctggacactttcgagcgcgatcttctgtactagctcgaaccgtacctcagacgcctgagatggacgtcgaccctctgctctcctcgccctgctcgccgttgtaccacctcccttcatccctccacccccgaacactttgctatcctccagcgcccgcgctatctggctcgagccgcatcaggtcgtgcgaaagcggggacatgaataagcgtcaggcgcgttttgaagagagacccgtgaggtgttcgtgggtggtcaaaggcaagtgtagagaaggggggtgcagcgaacaggccagggggttgaaacagggagggaagatgcaagcaggcgagaaacagagacggagaagggaaggggaagcgcaatctattcgctcttggtcttcttcgacttcttcttcttcttctcgccgtcctcgactgccggctcctcgtcatcgtcgtccgcccggcgcttctttgacttcttttccttgacctcgccgtcgccgttggccgccgcgagcttggccgccttcttcgccgccttacgctcctctttgctgagctcagcggctccatcgtcgacgtccatgccgccagcagcagcagcctcggcggccttcttggcagccttggccgccttcttggcagccttctcgtcgacggcagccggatgcgtcgagaggagaccggccggggcgtcggccgactcgttgtaggcggcaccgctgcccgaggcctcgtacttgctctgcttggggccgtcggcggccgacgaccgggtcgagacgatgccgagccgatgctcaagcgcccggagccggctctcgagcttggctcggttctcaacaccgatcgagggagcaccctcggtcgacttggagtcgtcatccgcgagcgcgtcgacacggatcgagagcgcggccttggtggcaaccatgcgagccattttccctggtggagaggagggccagtgtcagtgcgccgatacgcttccgaagaagcgacaggtcgacagtaacacacccttgagcttctgcggggcctggccgatgagcgaggcgtggtagatcaggccgtacttgggcgtgtcgtgcttggtcttgagcgcgcggaagagggccttctcggcgccgaggatctggacggtcgatgccgggtgcttggcgaggttgaggagcgagccggcgtgcgagatgagccgggcgccgacgagctcgccgacgagggccgtcaggttcggggcgatggccgacatgcggttccggaggtactcgaacagctggatgcggtactcggtaatcgagatgacctggtcgcagagcgagtggatgtgggcaatatccgagtcggaaatttcggttcccatcgagagctcggccgcctgcttgagcgtcgcctcgaggtcctccgggaggatatgctcaaacgacgtcgtcgagcaattggtccggaagcccatcgcccggacaaccttggcgtaggcgaggttgtcgacgatgatcttggccatctcggggaagtgccagccgtaccactccttgacgcgcattgagtagatgttaatctccttgtcgaggtcgtcgagcagggcgatggcttggataatcatcgtgtcgaccttgtcgggcgaaaacttgagcttgaaccgcgagagcgaatgcgagagaccgagcgacatggtggcgaggtccttggggtcgaggcccttgaggagcgacgtgagctgctcgcggataccacggtagaggtcgagcgtcgtcgagtccgagacgaccttgatgccgagcttcttgctgatggctccgccgagcttggcgtcgccgacaatgagcgtctcctcgacgcccttgcccttcttcttgctgccggtgacctcgtcgacgaggaacttggacagcaccttcgagagcttgccgtcctggagctgcgtcaagtcctcgacggcgtccgccgtcgacgagaagcggtggatagccttgagcttgaggctgcagggcgagagggcaacaggcagagagtgcgcgcaaggaagaagagggtcagccctcccgtccgtcgtcgtcgtcgtcgtgcgacgcatgaagagctgccacagccgccctgtctacccgccagagttcagagcgagtcgctgcacgagctgagcagcttctgctcgtgtcggttctggtggcgtagctgctccgagctgggcggcagcagcccagcgtccagtgacgaaggaggaggactgacaggctgttggcgccctcggccgtctcaaagtccttgtagaggtcgtccttgccaatcttgccctcgtcagtgacggagaagagggcaaagccgatgggcgactcgctgaggacaagcatcctggagaaaaagaagtaggggtagggaggaggagcgggtggtcggacagagggcgctgctggtgctctgcttctgctctgcttgcgacgagtctgccccggcgcggcggggccagcctgcgccgccgcgcagaaacgaaaactgagcaggcccttctttatttttcagacctcgccaggcagagggtccccacgcgcaagacgcacgcctccttctgctgagagctcaacttgtgtttgcaaaacttgttgatacaaaaagatgaggggcgaacggggcatctaccgtgcaggctcctctagtccgctgctgctgtcctcgccggccgcatgcttttgagcggcaccctcgccaccgccgccgccagccgcctgggcggcataatcgctcgcgacattcttgatccaggcgccgatgctgccgaggaagccctcgtgccggaggaacatggcgcgcttggtgccctttgaccaaaagcggatcgcgtacgagagggtcgagatggttgccgggtggcctgtggaagggggaaggcccgggtgagacgctgagtcaaggcaaaggcgagggagcgggcgcacctcggatgaagcagccgccaaagtagatgcgctcgaggtcgtacttttcggcattcatgtgcctgcgcgggagagatagagatgatcagtcttcagcctcgccaggccggctcgattcacgggggacgcacgcaatctggccaatgttgttcgagacggcgtagagcaagctctttgcgaggtcctcctgcttccaggccgccttcttgcgccggataccaccctcgccactgccatcgctgctccggggtcccttttggaagactttgccaaaggacgaggcaattgtcgacgacttgaggccaatcttgctgtagtcggagccgtagatgtcgccgacgagcatgtcgacctgcgagttgtcgcctcgctccgagagcgagagcatctctgccaaagacgttgtcaagttagcatgacgaggcgggaatgcaggcgcacgacctaagccacacgcaccgtcaaagctctcggcgtcggtcagcaagctcagcagcccccaaagcgtgccgccgccgaggcttgtcccgctgacgcgctcaaacgagccatcccgatcgaccttgacgattgagacgcccgagccaatgttgacgagcaggcacggaaactggggctcggccgagggcgagggcgcaaacgtcaccgagaacttgggcgggtcgggcgacggccgagggaggtcggtcaagggcggtggacggggccggggtaccgaggctgggtcgccggacgagtggcctttgactggcaaagatgaggaagaggaggttgcttgcggcggtggtgacggcaaatgcggcgccggcgtcggattcggcgaggggtagctcaggtgcgatatttcgtagacgagctcgtcgccgtaccagaagacctcgttcgggatcgaggtgatgaacgagagaccggtgatgaggcactccatctcctcctcctggacaacctcgaccccgagctcggcgacgaagcggtcgtagaacttgtgggcgccgccgccggtcgcaatcatcttgacgccgcgcttcatctggtcgaccgagacgcgattggcgacggccgactgcttgatgagcgagttgataaagtcgatgcactggtcgatctgggccgtctcgaaccgggtaaagttgatgagcccgcctgggagattgggcatcgtcgaccgccgcttcgacgacgacgtcgccgatgagcctgccgacgagtacgccgaagagcgcgcaaacgggttgctgctgctgctgctgctgctgccactcgggccagcctcagccgacgccgagaacgacgcccactgggcgtgctcgaaagggtttgacggcagctcgcccgtcgctaggacccgcggcgttaaggccccgttcgggttgggccggagcggcgtcgggtcgtcatgcgcggccgtctcggccgggtcgataaagggcgagtcatcttttggtgttgaggaggaggacgtgccctggcctcgtgcgatctgcgccttgtcgagcccgttcggtggaagcggtgaccgggtgaagtagacgagtttggcaagcgagcctccaatctgcggtcgagagagagcacggacaaggccggcggggaggtcagtcgaccgctcggcggcgagccgcagctcttcaatttgctactgacgtcgacggcgatatgcgagacgggctcgatgtagtgaggcaggtaaattcctcgcgagtctcgagtctgcgagagaccggacgagcagggaggcacgagagcacgaacggcgttgtcagcaaaggagccggtcggagctgatcccgaggtcaagagctcaccgctggcgagtcctcagtgatgatttgggcgccctgggagatccagcattcagcgtgagcacgtctagtccgcctggccatgcccagcagcccttcgacccaaaggtcggcatcgggatgggggttcgagctcactcgagtgtcgaccgcaatggaccgcggcgtggggatgacgacctcgcccggcgacgacatgcgaagcaagttgaccgtcagaggttgcccttctaggtcgcaagggcgtaggcctttgaaggagctgtctgggagggttgcggcggaggaggcctggtgggacgagatggccgtccgagggtggttcgagagcggagacggccgtcaaccgagagtccagctctccttcccccgaaccgccagcatcttctcagcactcttcgcctcctccttccagcctcgcctcctaaattatggccggctcgccttctccgcaaaagcgccgcagggtcacccgagctggcgacgtcgccgaggcgggccttccgcctggggtagccgacgacaccctcctgacgctcgacgtcgcgacctttgagcggcccgaggacgaggacgaggacagcgacggcattcagcgagccgacggcgaccaggacggcgacgacgagtcggccgacgactggtcgggcgacgacaacgagtctgagacctcccggggcaggtcccagggtccggcagcgagcggaagcacgacgccgacgcgcaagtgctcgcgctcgacctcgcgagcgttgacgccaagccgcaagacgccctcgaagcgcaaggcgacgccgtcgaagcccaagacggccaaggcgacggcgggcccgttcgtcaagctgacggcgtccgacgccttcttcacggctcagtcgcggccggcgaggacgtcggccaatgtcttctcggacctcctcccgccgctcacgcaccagcagtacacgagcctgctccggtcgtcgaccggcgcccagcagcacgagtttgcgatcgaggacctctcttacgcacacgagtcgcgctggctgggctgggcgcgcgaactcggccagggcttcaacctgctctgctacggcctcggcagcaagcgcgacgtcctcaaccgcttcgcgaccgaggtcctcgccgataggggtgacgtcgtcgttatcaatggcgtcttcccccggctcaacgtccgagacgtcctcgcgacggtcgagtcggccttcccggccgtgcgtcaggcagccggtccgccaccctccgcccaggcgtcggctgtcgacgcactcgcctaccggatctacactcacttcctcccgctcaatctcacgccggcgcccgcgcacgagctcgcgtccgacgacctcttcttcgtcatccacgggatcgactctccgggcctgcgcacggcccaggccaaggcagtcctcggcctgctcgcgtcgtcgcctcggatccacctgctcgcttcggtcgaccacgtccaggcgccgatcctcttctcgacggccgagacgcatagccggccgcatgcctacccttccggctggcatgacgccgtcccggcctcgcgaggctacaactggctctaccacgacctgacgacgctcaggccgtacgatgccgaggtcgcgctgcgcatcacctcagcttctaagctccccacggccggcggcggcgctggcctcgctactgaggagggcgcacggcacatcctgacgtcggtcaccgagctcgcccggcgcctgttcaaggtgctcgcccagtcgcagatggacagcatggccggcagcgcgacgcgcgctgggcctgctactgcagccgccggtgcgacggcgacgcccggctgggcgatcgagacggcgctcttcttccacctctgtcgcgagcgctggatctcgcgcgaagagacacgtttcaaggcgctcctgctcgagttcaaggaccaccggctcgtcgttgagtcgacgacgccgccctccggctcggccgacggcgacgacgctccggacgaggtcgacacgccggccggtagcgcgccgggcacgccgcgcaagaaggcgaaagccaacgctcgctggctttggattccgctcggtcgcgaggcgctcggccggctcgtcgacgatctcgcagaggtggccgactgaaggcacgaagcgaaggtgagcgagcccctttttagcgacatgagcccctcggtccagtgatactgacgcgtgacggcagccccagactaggctctcccatctcttttttctgatgcacgaccttgatgatgaccttacgacctctctctcgcaacggtttgcctgcgccgacagacggtcgacttgggagacgaccgtcctgcagagcccgggcaggtcgatgaacgcgacggccgcccacgatgctcgtcccgcgcctgctctcgttcagcgtcgggtcagctaagcggcgctggtccgtccgttgcggcccatccgctcttgagcccctgtcccccctgcaaagctaccctccgagcccacttcgtcgtccagcctgctccgccccagccgcacaacccgccggcgagcaagttcgtcacgttcaatgcatcatagtctcgggaggccgatagagctggcaggtgggccaggagcttagcggagacggctgttgggagaggaagggagcgggtgcgcgtcagtggcagttcggacgacagcgacagcaggcggcagcggcgggcaacggcgtgcgaggatggttttgctgagggccacgagcgacaggccgtgcacgaggaagaggagcaaggcacgcggaacctaactcctctctcgcctgcaacgcgtcactttcgaccccaagccgaccagcacccccgcgcccaaccctccttcccgaccgcaagctcgaaggaaacggaggacgcaccgagcctcgcgctcggactcgagcagcgcaaggatgtcgtcctcacggacggggcccttgacgttgcggatgatcgaccgcgacgtgtcgtcgatgaactcgacccggacctgggtgacgccaccgcgggagccggtgcggccgaggaccttgatgacacgggccagcttgacgggctgcttggaggcggaggagtcctgtggtggcgcgggatgaccaggagggaggaggaggcagagggaccgacgacgggagtccagaggcaggcagcggccggcaatagcagcagaagcgaccgcagcaggacgagcaggcgagcacgaccggggcaacagggcagcgcaacgagaagcagaggaagagagagagagcgcgtagaggcggaagagggtcagcagatgcaacaaagccaggtaggaccacatgtcctagggccttctgctctctggccgcaccatcttgagtaaaggagagctcgactagaccgttaagggggaagtagagggatgagctggagggcgaaagagccggtttgacgaaggcgacgtttcgagtgaatggggtaaagagtaggcggcgaggtcagtcgtctgatctacacgagcgctcgagcagcctcgggcgggccatcctgcgtactgacctggatgactggtcgggtagggtctggctctcgcacgcgcccaccgagccgtagcgccgcgaccccagccggccagccaggcgcgcccgcccgcttgcccgcccgcccgctcgcgccgcgcggaattggcctgcgcgcgggcgaggcaagaaaaatcctaaattatcattcagggtcggttcaatctgatcagactctcgttgagctcacgagggcgaccaagacatagcagggcacagaaggcggcgtgtgcgggcagctgagcccctgcaaatgcacggagcatgtgaggtgagtcgtcaagggaagggaagggaacggcgaggtggcatgacgatgcgcaatgcccgcgctcgacctcggctacagcctcaccctgcgcccgactgctgacgactaccctgcggaccgaccgctgacctctgtcgctcaattgctggtaccacgctcgctggctgacccttacttcgctgaccgctgttttctgctgaagagggttggacctgtcgctggtctgaaatgggtgtctcggtgggagcgccttcgtgcggagtcggctccgggacagctcttcgtcctcgagttggcttctcctctccttcgatgctcggcgcaacgtttccctttcccggctctcatagactgttcgcacatgtgatgaggggtcccgcctgcgcgatcggttgctgcagcacgactccttcatcccaggcgcttcagaccttttcggccgacagttcgggctgagacctcgctgctccagacgttggttagaatgcgacttctgtttcttctcatgagacgcatggcgagtcttgcagagcaggagtgttgcagaataactggacctacgaccagctgtaggagttggcggcgagagaaaggggtgcggggttctgcgcgcaagtgcgaattcgccaccttagcactcgtctctcgcacgatcgactgtgtatcgacctgagattgcggaccgcctccttgcgctgctctggactgtgatccgacgagctgtcgtttgtcgtgcggctgcatacccgtcctgccggccgatgacaggtgcctgccgtgccttgacgcgtcgacgcgtcctttcagccggcgccacccccttctccctgctgaccgtcttaattaaacccctctcaaaagctgctgacgagcccgtccgctctcgttcacttctcctgctaatcacgatctcgttctctcgctcaaatgccctttgtcgacattgtctcgaccgccgggccagcgcgggtttggtgcaccatctcgacgccgaccgaggctgaggccgagcaaattgagccgggccggccttgtctcgtcttcctggtgcgtcctcctgcttacactgttgtgctgccccgtcttgcctgcttcagaggccgtggccgtgagctgacgtccccttgagtttcctgcccggcagcaccccgtctactgcgcctcgtccatctggcaccgtccgtcccttaccctctctcctctctcgcccagcagccgcagcctgaagcccttccctgccctcacgctgcgcaccagctcagctgctcgacccggccctccggcgcttcaacgtcattgctctggacgcgcgcatgcacggccggacggaggggctcgtaaaggaaaactttgacttcaatgttcgtcccgcttccggtctggctaggctctgttgggcaaagaagctgaccgggaggctgttggacggatgcaggatgcggcagatgacgtctaccacgtcctcgtccgtccctctttcatcttgagcccccgtttgcacttgagcctgacttttctccatcgtgtgcctcgctgcagaaggccctcagcatcccgccctgcatcctcgttggcctcagcatgggcgcgacggtagcaatccgcatgacggccctctacccggcgcagtgcaagggcctgtttctcgtctcgctcctgccgccggtcgaggtgcgtcagactgaggcccacgctgccggtccgagggcagggcggcgcacgactgacaagtgctcgtccgccctacgacagccacctgagggggcgctctttctctgctctcctcctccttctcgcttcacccgctcactgacccccgcattcttgcttttcctacagtcgccgccggccggcgcgaagtctgggagacgtttgccgagggcatccggaccgacgaccccgcgctgatggagctcggcgcatcaggcgcggcccagctcgcgtttggcgacgcaaaggatcccttcatccagcggtgcgtttgtggcgcgtctgcatcgtcgggtggaaacggcggcaaggggctgaaactgactccttactcactaccgacaacgcaggatcttcccggcaacggtccgcctgctcgctaagtcggacccagctgtcgtcagtcttggtcccgctcctgacctgcctgggtcgcgctgagcctttgcgacggctgaccctttttccggcttgacagctccgtggccggcacctcatcaccgtcgagctctttatcaatcgcggcggcctgaccgagcccgagctccggcgcatcaaggattgcccggtcaagatgctctgggcgagcgaggacgttgcgtacgacctcgggagcatgcgtgagaagaagcgcgacctcgacgagggcgggctggaggttgagctgatcgaggtcgaaggggcgccgcacgtgagtactcgcctgcctgcctgggtacttgtgctcaaacccttttcgctgactgacaaacgacctcctcccggatcagttcgccagcgtcacgcatccccacaagtgcgtcgctcccctcgccttccaacccttcctcctcaggccgattgacccctccctccttctccacggccaggatcaacccgctcctcctctcctttgcctactcccgctttccctcgtcgaaaaaccttcctgcgccagacgtggcagcggttcagagcccattcgagcgcttcttggacccgctgcctgcgcctgcgaaggcggacggggttggcaaggatggcggagaggcgagcggcggcgaggagagcgacgacgaggagggcgggtgggtttgaggctgagttttcttgaggcgggcggttgagcaggaagggaggcttcgaggtggaggggccgatcggatgagttgtgagcgcgaacgacgttccggctggatatcagcctggagagctcgttccgagccgcagcgtgcaggtcccggcgtcgactgcccgtctcggccagccagagcggattctagagacgtccataccatcgagaggggccgagaagagaagaaagggggacgagggcggcactcatgccgaagcggcgacggtgaacttggcggcggcagcgtcgaacgcagcggccttggcggcgtagtcgacgacggccgggtgggacggtgcgagctcggcgagttggctagcagtgaaccatgagcagcatcgtcagcacgcactctgcctgagagagagagggtaggagagacgcacaagtagaatgcctcgccccgctcgcttccgaacgccgccgccccaagagcctggacgctcggctcccgctcagcgccctcagcgccaagcgcctgctcgacgtcggcccgcgcctcgtcgctgtgcccgagcaggaggtgagccgcgccatgtgcggcgaggatcgatggctggcgggacgacgacgggaggaggaggagctcgtcgtagaagtagtaggcctgctggagggcgggaccttgctgcgaagggccggacggacagacgagcagagatgtgtcagcgggcaggcccggtgacgagcaggggtgggtcaagggagggctgggcgagcaagtcaacggacgcaccgagcgcaagcccagccaggcctcgacctgctggacgaggtgcgaatcgtcgccctggctctttgccgcctcataaaccttgcgggccatgtcgagccggttgatcgacaagtagatctggacgagaagggcagcactgccggaggtgggtggacgcgatgtcagctgctgggggcgcagcggcgggatagagcaagtctcgcgagcagccgacggaggaagggagcttaaggggtaacgcaccactcgagagactcgtgctctgcgctcagcaagtcgaccgcctcgacccactcgcccgccttgacaaagagcgttccgacgacagcctttgcgctgcccgcctgctcgtcctcttcgagctcgatcgcgagatccctcgcctgctcaagcacggcctcgcgctcgctctcgtcatccgccgcgcgcgagaacgactcaagcagaacgacggccttgagcgtcgcgtcttcggagctcgaggcggctgagaggagcggggcgtaggcggacggaggcgaggcgagggcgaggtgcgaacggagcgtgtaggcgaggagcgtcacgtcctcgggcaacgaaggggccgaaggcaggaggggcgttgcggtcgagatacctgcggacgattggagagagagggagacgtcagccggggggagagtcggagtcccaagcgaggacgggagacagacaggaagtgtagttgcctgatgacgggccggggagatgggacgagcggcggcggcggcggcggcggcggcgggagaagcgggtgactcaagaggatcagctcctgccgagcttctttgacacgagctcgacggcagcgagcgcaccctgggcaaacaggttctggacgtggaacagctggtcggactggagcatcgtaggcaggaggatgatggtggttcgagagagacgagtcgttgcaactcgctcgcgacaaggaggggacgcgccccggacccgccgacgtcgacctcgtcccacggcgagaccctcctctccagcgtcaacccgcagcccatgtcgcgaatcggtccgttgctctctctgtgctgcttgctgctgccactgcctctgtgcttccgactgactggctggatggccgactttcagagaagggcggcaacaagttccgaccggtcgcccgcccgcaggcgcccgtccggccaaagccaccacaggcgccacgacctgccgctcctgccgctgctcctgatgctgggccgtcatcgtcgggcgtgccgccagtctcgtcgcagatgctaccgggcctgacgcaggatgcgacgcaggcgacgcagacaaacacgcaggcgagcacgcagccgccaccagcgacccctatcgacgacccgtcgtcgcaagccgccctcggccgcccatcaacccagccagccgacgagggggcagccatcgcgatccctgtccggccaccaaagccggtcaacccgtacctcgacagagtcgctcctccgccggcggcggtgtacgtgccgtctgcgcaggcggcgcccggcgggccaaggggcggcggacgcgtcgcgccgcggttggcactctcgggcggcccgacggctgagctagaagaggacggcgagggaggggctggagaagagaccatcgtcgctggttcaagtcggagactgtcgatgtcgcaaatgcaggccgggccgtcgtcgccggtcgtcccgaggaacgcacgggccccgacgctcgcgacggccggcgggccagagagctcacccctccgccgacctgcgacccttccagcgttagcaacagcagcgcaggcttcctcctctgctccgccagtatccagtgcgcctccgcccgccgccccagcagcagcaagcacctcgcgcaaggttcctccttcaaagaaggctgcgccggctaagaagcgcgcgccaaaacgcacccggctggccgcgacgcccgacgcagacgatgacgccgcgccgtcgcgttcgacatcggccgctgctgctgctgttgtcgcgcctgcgccggccgaggctgaaggagactctttgccagctgaggtcgaggcggaaagctcgacgacggcggctgacggtcgagcacgccgccggccgccggtacagccccgagcgacccgaacgacgcgtaacaagcggccccttgtcgccgacaacgacgacgagctcgatgagctcgcgcccgactctgcgacggcggtggtcgtccctgtcggcgagtcggacagcgagcatgcgccaggcagcggcgacgacgacgattttccagagatggcgcgggcgatcgaccggggcgtctcgaaggcgtcggtcaaggcaaaggcggcgggtgacaaggcagccaatgcggccgaggccaagggcaaaggcaaggcgccgcgcaagtcgcgggcgaagaaggacgcggcggccgaaggcgacggtatcaacgtcgaccccgacgtgcctgcgccggccaagaagccgccggccaagcggcggaagaaagcagcgccggtcgacggcgaggcggtcggcgacgacggcgacggggaggaggcggccaagcccaagccgccgaaaatcaagcgcaagcccggccggccacgcaaagtcataaagacgccgcctccgctggccgaaggcgaggaggcagagggggatgagcggccgtttgacctcgcgacggcgacgatgtctgagctctgtgcggacccgggcgtcggccggatctcaacccgcttcgaggagatccagcgcaaggcggccgagctcaaggaggctcgcaagcgggcgcgcctccggatgaagcagcgcgtcaagacggaccgtgagggcggacgggcgtttgacgagccgagcgagggcgaggaggagggtgccgctccggagggaggggccgctgcagcagaggctgggccgagcaaagggagcgcggctgcgcttgagagactcgctgctagtcgacggaccggcggcggcagcggcggcggcggtgacgacccggccggctcaccctcagcggcggccgacgatcctaacgaggacgcctcggacgatgatgactacggcgcgccctctgctgccggaggcggcggcgccaaccgctacgcgccgcagatgcgcgtcgtcaacggccagctcatcctcgaccaggactcgctccagattgaccagcacgccgaggctgagcagcaggcaaacgcgtacgaggaggtcgaggagcgcgacctcgaccgctttgtcaaccaggacacgtggcggaagaacccgcgcggcgagcgctgggggaaggccgagacggagctcttctacgacgtgggttctctctctctctcgcctcgtggccgccgctctcgaaacagaccctcgctgacccttcccccttcccccctcgctccggctacccaggccctccagcagtttggctccgactttgagatgatggcccggctcttccccggccggacgcggaagatgatcaaggccaagtttacgcgcgaggaaaagattgacgaggcgcgcatcacgagggcgctgacggcaaagatcccggtcggtcagtcgtcgtctcgctcgctccgcgtctttttttccttgcgccttttggtctgccgccgcctggacgggagagacgcgcgtgctgaacacccttctatctctcgcccccctcgcgcccctcctttgctctttgcttcttctctcgcaggaatatcgtatcaatgtccctcgcacctgacattctcgatgcacgtcgcccaatggaccgaggtcgtcacactctcgcacgatgccattcgctggctcaacatcggcaacaacgcccaggtgcgcaagagatcttgacccgtcgtgcccacttcgatcgacactgacgctgcacctcccttcttccggaccaaggtgctcgactcgctctttatcacgagctacgcgacgacctcgatcgcgctcgtccagtatcacacttgggcccgccgcaaggatatcgcggctctcgagtcgctccggatcctcaaggacattgtcaagcgctgggaggcctcagtccagactggcgacgtcgtccacccaatgtcggtccggcgcaagacgctcgaggtcatgggccttctttactcggccgcaaagcatacgtcgcctcatccgcaggcgtccacgacgcccggcgggtcgagcgacggcggcgggcccgaggagcggacgcttaacccaacgaccggcgtcgtcaaccggggggcgctgatcggccagcgcgtgctctggctcaaggacgcgtcgttgcctggcggcggcatctttctcgccgaggacgctgttcgcaagaagctcgaggccgagggacttcgccagaatgtcgtcctcggcatgctcggcggtccgtctgacgagccagatgcaaacggcgcaggaggagacgccgcctccgtcgccaacgggacagccaactcgcagatgccggccggcaatgagggcgtcttcaacgtcaacccgcacatccaggtacgtcgcactgagccctgctctgagctcgctgcccgccagacgactgacgtgcgtctttgtgcttgctcgcaggacattggcctctccaacatgagcgcagcgcagatcgatccttcggtcaacgacccgactttcggcggcctctacgcgcaagacttgttcccgcctgcagcggcgccctcgacgagtgccaccgtcgggccgggctcagggacgaccgttgcgatgggtccgaacgagatgctcgacggcctgccagccagcgtgtgagttcacctcgacctcgctccctcgcaagtgcctactgctgatgccgtctcggcctcctgcagattcgactggccagcctgggacaacttttggtcgcgggtcgggctcgacgtcgatgcgagtccaggttccgacttccctctgaccgcagccgggggcacgccgagcggaagtgtcggcggcggcagcgggccatcgctcacgcccttctctgtgccgtcttcttgagcggccctattttacgatgcctcttgattatgacttgacgctcccttcgcgtgcgacctagtctggcagacgagctcacagagatttagagaggacggcgacgtggtccgttacaacttgggcgggccggccaagttgcggctgacaaacgggcgaacctcggagggtcagcggagaggcggcggctccgcagcaggctctgtcgactctgtcactccaaagaggtcaagcctctgatacttccctatttgttgacgaccagccgctctccatcactctcttcagctcccctctgctggctccagccactgcccaacctcagacgctatgcgcgtgacagatggctgtgcgtcctctcgccagcgcgacccgacgctcgagcccactagctgacggtcatctccgcctcctattcctcaaccctttcccgccagtgtggctcaagcggacaggcgcagagattcggccagcggtcgaggtcgcagaggtgacggtcgacaaggctagcggctcggtcgaactcctcgtcgcctgcaggcacatcgccgaccgaggcgcgacgctcggaggtgcgagcgtttcgcgactgcccttcgtgccgactcgagctgatccggccgcacgcctctgtcgcccccaggcccgctcctgacggtaaaactcgactcaccactcgaggacgttgtccgagttaacatccagcatttcaaggtgaggccaaggtgcagggcggagcctctcaccctcttgggctgatgactatgtcgccgccgtgcttgctgcgcctcctctcctcccagggcatccgccgacgtggccccgacttcgaactcttccctgacggtcagccgtccgcacccaaggtcaccatctcctcgactgatgcgagcatctcgctcaagacgggcggcctgacagttgaggtcgaccggtcgccgtcgggcttcaacgtcgacttcaagcgatcgacatcggcctcgggcaaggccaacgaggtcgtctgcagctcgggcttcaagagcatggcctcgctcggcctgccggcaaagatctatgcgcaggccgcgagcgaaaccagcgtcctcgcctcgaacccgtacgccgatccgacgccgcggggcgtcaagcagtttatgcaaagcgagctcagcctgctcgtcggcgagcgcatctacggcttcggtgagctctttggccctctcgtgaagaatggccagagcatctcggtctggcagcaggacggcggaacctcgagcgagcagggctacaagacgtgggtcgcctgcgactgtcgtctctctcgagcctcggcgatgctaaccccgcactggactcctcctcagtgtccccttctacctctcgtcccgaggctacggcgtcttcatcaaccatccgggcgaggtctcgatggaggtcggatcggaaaagggagcgcgcgtcggcgccgtcgtcgcgggcgagcagttcgagtactactttatcaacgggccgacgctcaaggaggtccttggccgctacacggccatcacgggccgaccgggcctacctccggcttggtcctttggcctttggctctcgacctcgttcacgaccgactacagcgaggagacagtctcgggcttcctccaaggcatgaaggagcgtggctgccccgtcacggtcatgcatctcgactgtttctggatggcgcagttcaagtggtgcgttcaagcgagctcaccaaaacgtcgcatgctgacttcccctcacccttttgggcaggtgcgactttacctttgacccgctcgcctttccggaccccgcggcctaccttgccaagatcaagaaggactatggcgtccgcgtctgcctctggatcaacccctatatcagccagcagagtaagcttttccaggagggcctcgacggcggcttcttcatcgagcgcaagaacggcgacgtctggcagtgggatctctggcagccggggctcgccgtcctcgacgtcaccaacccggccgcgtgcgactggtacgtctccaagctcgagaccctgcttgacatgggcgtcgacgccttcaaggtcggtcctctcatcggctttcgctgaggcttgagtggacgagcctacggctgacgctctgactgcgcccgctgaacagaccgactttgccgagcgcatcccgcacgtcgacgtcaaattccactcgggcggcgacccggaccgcgtccacaactggtactcgctgaagtacaacaagattgtctttgagctcctcgagcgtcgctttggaaagtacgaagccgtcctgtttgcccggagcgggaccgccggtggtcagcgctttcccgtccactggggtggcgactgcgagagcacttgggaggccatggctgagagcctccggggcggcctcggcctaacgctcagcggctacggcttccactcgcacgacatgggcggctttgaaggcacgcccgacgaggcgctcttcaaccgctggctcggctacggcctcttttgcacggctcccagccgattgcacggctcccactcgtaccgcgtcccgtggatttacggcgagtcgtgctcggccatcctagccaagctgacgatcgctaagcaccggctgatgccctacatctttgcggcggccgtcgaggcacacgagacgggcgtgcccgtcatgcgcgcgatgatgctcgagttccccgatgacccggcgactgcctacctcgaccggcaggtgcgcgagacctcttgacgctgttttgacttctgagggctgacgcttccccttccacccttgcagtacatgttcggcccctcgctcctcgttgcgcccgtcttcagcagcgccaacgaggttgacttctacgtcccggctggccggtggacgtccttctgggacccagacgtcgtttacgatggcccaaagtgggtcaaggaggtcaacgtcccggccaaccagtcgcgtcccccttccctttcgcttccgcctgcacgacgctgacttgtgccaagcgggcttcaccttctcagcatccccgtcctcgtccggccatcgacggtgctcgtcctcggcccgcccgaatgcccgcacccggtctacgattacgcgtcttcgccccacctgcaagcctacggcgttgtcccgggcgacaagccgatcgaggttgtcatcccctccggcaaggggactgccatcgccgcccggctcaagattacgctcgaggagtatcagggcgagctcactgttgaaacagtcgaggggcaaattggcaagtgggtcggctcgtccttctgagcggggtgatgaggcgcctttgcaaccaagcgagcttgagcacacgaagcgattacgatccccccaattctcctctcattctgcctgcacatctcatggcgttcgaaatttgcgttcgataatgggcgcggaaggcgcattgcatcgtaagtggagagtaggcgtacgcttcgttaaggggtgacgttgaaagagacgaggcacgaggaaaggggctgccctttttactcctcgaggtgctgctcgtagcccttctcgtcgtcggcctctcccgggacctcgtcaatctggtcgatctcgatgagcgactccttgatgatctggatcgccttgcggaggtcctcctccgagatgacgagcggcggggcgaagcggatgatgttcacctgccgagagcgaaagggaaaaggggtcagaacgaggcggtcggagaccaaggaacgccccttcagtcgtggaaactcacgtgcgtcggcttggcgagcaggcccttgctcttcatcaggaggcagaactgccaggcagaacggcccttggtgctctggccctcctcaaagacgacggcgttgagcaagccccggccacgaacctccttgacgagcggcgagccaatcgccttgatctcctcgcggaagatctggccgagccgctcggcccgggcggcgaggtcctcatcgacgaggacgtcgagcgcagccatggcaacagcgcagccgagcgggttgccgccgtaggtcgagccgtgctctccgggcttgatcgtcagcatgacctccttgttggcgagcacgcacgagacgggatagactggagccagcagcaagaagtgtaggggcgtcagcgactccgttgactgccaaacaggatgttcgccgagatgcacctccgcccgagagggccttgccgaggaggaccatgtcgggcttgacatcgtcccactcgcagcagagcatcttgcccgtccggcagagaccctgacgatgagacaagcaggaggacgtcagaggtcggcacaggtcggcgcggtaaagtaggctcggaaacgcacagtctgaacctcgtcacagatgaggaggacgttgtgcttcttgcagagcgcctggaccttcttgaggtagccgtcgtccgggacgaagatgctatagggccgataggaaatactgtcagcacgtcgtcataggagtagtcagcgatgagaaaggacgcacccggcctcgccctggatgggctcgacgaggaacgcagcaacgcgcttgccgtgagcctcgagcgcgcgctcaagtgcgtcaacgtcgttgtacgggatgccgtcctccatcccggggcacttgggcccgaggtttggcgggaaagggccaaagtccttgcgggcctcggggtcggtcgacatggcgacgatcgagatagtccggccatggaagttgccggcgaccgagaggacgatggcctcgtcctttgggatgcccttgacgaggtagccccatttgcgcgagagtttgagcgccgtctcgaccgcctcggcaccggtgttcatcgggaggaccatctctgcgagtcgttaagggaggcaggcgtcagccgggagctacggaaagcgttcctcacgccggaacgcaccgtagccgaacatgtcggtgatcttcttggcgaacgctccgagcttggacgagtagaatgcgcgggacgagagcgtcacacgcgaggcctggtcgacgagcgccttgacgatcttggggtggcagtggccctggttgacggcggctagcgaggagcgaatgaggttacgtcagtttgagccgctgccgacaggagtgcaggagggcatctacagtaggccgagaggaagtcgatgtactgccgaccctcagggtcccaaacgctgcagggccaagcaggagagagtgtcagctgaccggctggcgagcgcgcacgcatggggctgagcagggaggagatggggacgtacgtcgctccctccgcacggtcaaagcagctgtttcaagccgaaaagagtagagtcagcagaatgtcagccgtctagtcgtgcgaggtgcgagaaagtggcagaggcagcagggccaggtcgcagggctggtgccaagaggtcggccagccccgactccgacgccgacgggccgtgctgctgtctccgacgacctgaatccgctcgctcgtgctctcgtcgaaagaaggacgtacatgggcagcgggtggtagttgtgagcagagtactgtccaacacggattggtagggcgagagacgtcaatgtccaatacatctcgagctgggctgaaaggcagagggacggacggcgtgctcggctgcgtagcactgctcggaggacatggtcttggtggaagtcgacatggttgtgagggggagggaaaagggggtgggtgttgggaaaggagaagcagcctgttcgttctcggccggtctttaaacgatgcggttgcggtagagccgacacaggacgagacggcgtcagtctctctgccgtcgactcggctgccttttcggagccccgcatttcctccgacatccacctagtctcatctaccactagataagccggatcgtagggatcgcagtcgagtacagtcggtcaaacgcctcctttcagcccagaaaaaattgggcaagaaaatgagcgattccgtctcagaaagtacaggttgttgggcgtacgtacgatgctgcgcgcgagtctcgacgcccgcgcgacaactctcctctctccgccaatgaggcacgcctcaacgacgcaacctcgacaaccgcaggcgaggtcgtcgagcgcaatctcgctgttgatgacagtctttccagcaggccagctcaactgaaaagagctgctctccaaccgagcggagtcgcatctcttaagctcgcgtgccagcttataaaatattaaattgagccgagtcacgcttacgcgaaacctgtcatcgcctttctctctcgctgagcccttggcgttccgcccgcctggaaggatggatggaaggacctcgtccgggtcgaggcaaaggaaagtttcttaatcggagggcgtcccgtccgacgccctcatttacattgcttgtcgtctcctctccgtgcccctcggtccgaactatgcaggcaggggcaccaccgcccgaggaggggcctagtcgtacagtctagcgagagggaagttcctcgtagaagcggagcatcgtctagtcctgacgcgacttgaggtagcgagtcgtcacgtccgtctgggtgctgcgtgagaagaggaaggaaaggtcagcgttccgatcccactacggccatctccctccatccttgcggcgcggcacaggagaggcgggcacggaacgcacatgacgtgaacgaccgctccgttgccagagagcgcatcgcgatcgagcgcgttgagcaagacctgcgagatcgtctcaaacaggtcttcgggctcctggtgagagggtatgtcgccgtcgattgatgggggaggagacgagagcaagatgaaggccacaggaaggaagagcggtgtgcggtcagtctcgcgccttccgccgtaatggtaaaaagttggtcggacggaccaggtcaggctcccaaagcccctcagcgacaccaaagagcttctcgctcgccgtacccgcgacaacaaagtctttcggggtcgtaatgcagccaatcctggaggggcgcggcggcagcaagtcagcgcaagtccaggacttgaggacgtctcatcgaggagacggcctgctcggtgagatggaaccgcgacgagcggcgccgcgagagaaggagagcgtcagattgccaggacgcacaagtctgtgcaagcgatgaacggcttcgggttgggattctgctcgctgacagctggcaggcccgcaatgaccggctcaataaagtagggcccaaagcgcttctcgtaaagggtcgagctgacgaggtggcagaaggtctccggcgcgatctcgcgctcctccttcatccggtacatgttgacccggaagcggattgactcgtgcctgtcgggggggcgagaggagaaggggagagaggtcagtgatgggagaagacaagggagcgcctgctctgctcgacgcacagcgtgtggacgtcggatccgaggccggggaagccgacgtagagccggtcgtgaactgggaagacctggttgagcagagggagcaggacgtcagcgtgcgatgcccgtcgaccaggcgtgccatctgcgagccagcccgacgaggatgagcagaaggggttccgtctcaagcaaggcagcgacctgaacccaaggctcagaaacagctcctcgccctcacaactccctctcctgccttcccaatcagtccggttggagttcgtcctctccacccgccaagttggggggagcagcagctcgaggtcgacgtggaagaggaccggagccggcagctgccaccccgacacgtctcacccggtcccgctctctcgagctactagttcccggccccacaagagcgcagggcgaagaggatgcccaagcgacgagagcagcaaagcgctgctgacgagggcctgtttgatggagggcgaacttccagcggccgacaagcccaagtcaagcgagagcgagccacgagagccgcaccttctcaaagttgccagcgacgagcatcgcctggtttccgagccggagatccgaggcgattgcgacgcagtctttgccgaccatggcaatgaccgagcctgcgggcgggccgagggaggcgagggtcagcggtcggagagggtgaggcgaggcggggctcgagaagaggccctcttgcgagttctttgagcgggcagcagagaggaaagcaggacaaggaccgacctccgttgtactgcatgatggacatcttgagcgagctgtcgttcgtacgagaggagaggaagggcgggtgttggtcgagagcgatggtcgactggaagcaggcggacgtggaaggccgcgcgggcgacggaggtccgatatcgccctcagtcgtactttcgccgccctccctccctccgcacttcgctctcactcgggcagcggcgagaaggacgcattgacgcagggaggtgcaacataatccgaggtgacaaacgacagcaaagaaagagcgcgggagagttgattaaagtagactaagaggcgccaggcgagggcaggtcccttacgtgacggtgacgaccccacccttcccatcccggacgacaacaaggtcgcactcgacccgctcggccgccttcccatgcggccggagcgtcacgctcgtcggctcgagcccgtccgtctcgacgcccatcttctccatccaggcccggccgaggacgacagggaaatgcgactcttcagagagcatgacgacgtgagacgacgtctggctgccgaccctgcgagcgcaagacaacggggagaaaacgtcagtctgataggccccgtcgtgagcgagctccagtggcgaaggaggacgcacttgattggccacgagccgaggttgacgaggccgccgtagccataccagcccggcgcggcgtctgaggcgcaggagggaagccagcgtcagtgagcacgcaataagaggaagacgctcgctagggcgctcgaggacgtaccggccgggataaagccgttgcgctgggcaaactgtagcgagcgtgagagccaggtcagccttcccgtctcgtcaccagagcggcggagagccgccacgaatgatccggccgagacacacctccctgctgacatagacgtgcctgtagccagccttgagcagcatccggacgcccttgactggcccaatatcgcccagcaccgtccgcacgccattcttcgcatgaaagtcctcaaagaccttccgatggacctggcccgccttctgctccttcgagaccttgatcgtcgcatggtgctgcgcgagcgcgacgttgcccgtcttcccgtggtccgggtgaaggagcaggtccttcggcggagggacgtgctggatgtggcctgcattcgagggcgtgtggagcgcttgaccgaggcctagtgggccggagtagccaccgtcgacgcccgaggcgcgagagttggccgtgcagacgcccggcgcaaaggtcgactgctgaggctgctgctgcggagcctggctgggggcactggtcggccccgccgccgcacccgccgctttcttgccagacaccttcttgccgccggcagtggcagacggcttgccgcccgagctcgtcgagccggcagtccgctgctgctgcggctgtgactgctgcgatgcgtagccacccttggccggcggagcgagcaagttgaagtcgggctcggcgcccgaattgaggggaaagcgcttcaggaagatcgagaagtcgtcctctacagccatgaaatgcgagtagggatgtcagctcccttgacgaggctttgggaaggtcaagactgcaaggagggaaccgaccgtcatcgagcgagtactcgcgcccattgaagccgtagcggagccgccagccgccagacttgccaatctgctcgcccgaggggagcgaggccttgtcggcgatgcgcgagaagagggtcccgagggcgtcggacgctggatggagagtgagtgggtaagggcaggtcggaggggatgagggtgtaggtgtaggagtgagggatcaacgatcgagggcgctgtcagccactctgcagacccatccgttgaagccgcctaagcggcagagctctctccaggcagtcgacggagaaaagaacgcacgcgagagcgagagcgagaaggacgactggggcaggtggacgttggcgatcatcctggtcggtcgagggcagggcggcgtcaactcacccttgcgtgtgacatctctcccggttccatctctagctcgagacggcgagcgactcacggtcggactgtctggtcggtggatgggttttgacgaggaaagtacgagggcgatgctgccatgaagcaaggaagagggtgatggtcaaggcgagggcgtcgtccgcggtctctgaacgggaccaagccaaagggccgccgtgacgcgcgcgcggggaggccgagacccttcgagacagctttcctctagggatgcatcggacctgcatcggtcaagccaggaacgactgacgaaagtggagcatgtcgatgggagccaggagcaggaccggccagacgcacggcgcaagtccccgctggaaagagaagacacagtgtgcaagccatctgcctccccctaaaagccacccccgccatcgcgctggctctcggccgccttcctccgctgggcgtcctcaagcttcgggcagttgttggcgccgtggccgagaccgccgcagacggggcagccgccggtgcctgcgaagcctgcgttggggtcctcgagcccggcgaggaagggcgggatgctgcgacgaggcgaggcaagaggactgggtcagcccaagaggaagcgagagtagggttggaatgggacgcaccgctgcttggcctccttgaggaggtacttgaggtcgagcagcgtctgctcgctcgtgttcatgttgacaaaggtcgtggcaatacccgtcttgccacttcggccggtacggccaatctgatggacgtagtcttcgatctccttcggcattgagtagttctgcacaggtagagaagggcttgtcagtcggcgttccgcgctgaaggaagagagaatcgcgcgcacgatgacatgctggatctcgttgaagtcgagacccttcgaggccacgcccgaggcgaccatgacgtcttttgcgcccgacttgaacgacttgatcgcatactcgcgctcgtcctgcgtcttcgagccgtggatcgcgaccgcctcgacgcccttgagcagcaggtactcctggatgtcgtcgacctcattcttgttgtcgctaaagacgatgcacggcggcggcgtcttctgaaggcactcgagcagatagaccatcttggcctcttgcttgacgtactcgacctcctggatgacgtcgaggttggctgcgcccgctcggccacaattgacgagaacgggccggatgagcgagccctgcgcaaagttctggatcgtcttgggcatcgtcgctgagaagaggagcgtctgccgctggctctgcaacggtgtgcgcgggagggcttgggtcagtcgacaggcatcgtgcaagagggggcgtgccagccgtgaacgcaccttgaagtacgacatgatctcgcggacgttctcctcgaagcccatgtcgatcatccggtcagcctcgtcgaggcagagatacctgtgtggaaggaggaggtgagacggagttagcggccaaaattcgcgaagatggcgcaggcttgtggacccacttgcacgcgtcgagcgtaaacttcttcttgctgagcaggtcaatcagccggccgggcgtagcgacgacgatgtggaggcccttgttgaggacagctgcctgctcggccatcgagatgccgccgatcgtcaagaggacgccgaggtccgggtagcccgcctcgtgcaagcacgcgcacatcgccagcaggccgtcgtacgtctgcctcgcaagctcgcgcgacggacagacaatcatcgcaacgggtccctcgcccttctcgaacggcatcttgccctcctcctcgagcgcgagcatgatggccgggagcgagaaggcgagcgtcttaccggaaccggtaaaggcgatgccaatcatgtcgcggcccgagaaggcggtcgggatgccctggacctggatcggcgtcggcttgagaatcttcttggctttgaggtacttgagcagcggcggcggcagtttcatgtcctaccgggcgcggagaggcgtcagtcacgcgagcgtcgaggggagccggtcggacgaggggtcgtacctggaagttgggcgccggcggcgggacgtcttcgccctcgacctggaagcccatcttctcgcgaatcgcatcgtgctcctcctcagtcctcgcccggatgtaggccggcggccgccacgtcgccttcatgatctcggtgtactcgacgccctgcgcgagctcctgattgcccgcgagcttgcgctgctggccctggagctccttcaggagcttctcttcctcctccctccggagctcgtcggccgtcttgcgcgcatcctcctcggccttgcgccgcttgacctcttgcgcgttgtcgagcagcgtccgctcgcgccgctgcttgtcacgcttgcgcgcgagttcggcttcggcctcgagccggagcgcctccgagtcaagcagcgtctgcgcctccttaccgccgcgcgaggcaagctgctggaagcgggcttcgcgccgctgggcgagagggacgtagggcgtgtaggcctcgtcctcggccgcgtcgtcgccgtcaccgccgtcggcctcctcggcctgctgctggcgtcgccgatgcgagacgaagacgggcggggccggcatcgctgacgagctgccggccggtggcggtaaaggttttgacgaggtcgatgccatgcgaggagaggaaggagaggcgcagctacaaagtatgtggctggggatgagaaagttatcgcggtggtggtaggtaaggcaggtgaggtcgagtagtggtcggtcaggcacgcggcggaggggcttaaccctaggtgccgcccgcgcgccagagatttcgtctccgccgggaggcgcgtcaagcactccagccagccagcccaacctcgacggtactcgcctcgcccggcaagactctccctccctccctcgacggacaaggacgcgatgcgcaagacaccgagggagatttcgatggcctcctccaagctcccgccgccgccgccaccaacacaaccgacgacggccggccgcaaacgcaaggctgccgtcgacccttcttcgacctcctcctccagcggcagcagcagcagctcatcctcgcccgaacggccccctccgccttctgccgcaactacctcatcctcaagggtcgccaagcgggcccggccttcattgaaggcagcggctttggctccaccggctcctgcgtcggtttctccgggacctgccaaggcacgccgccggtcgtcggcagccgttaggccggcctctgccgacgtcgaagacgacaggccagtgaccccgctggcgacgacgacgctcgtctggccggtcgtcaccttccgctcggccgacggcgagcgcgagtttgaccgcgtctttgaccgttcgtgcactctcgtcctgcctcctcccgcttcgtgtcctgacctcacgcgccacctctagcggacacgctcccgtcacttgcgagcctgaaggagctcatcggtcgcaagctcggcttcaaccggcccgaatcgagcaggtcggccaaccgtcaattcgagctgcacgtccttcgccagcagctccctacagccggcctaggcggcggcagcgcctctctcgcgcccgtctccgagcagactgctatcatcgagaagctcgttgacctcgaggacgaggtcgactactctgctttcaaagctcgcgctcatgccgtagcgctccgcacgaccgagcggcttcggctcgagtctgccgcgtcgagcgagagcgttgcggacgagcaggcaggaggaccgccgagcaaacggcgcaaaatcgagccgtcgtcgacgacggcggcactggcagccgcagcggctatcacggaccggctcatcgtccgtttcactgtcgctgttgcagatgccgcttctcccgctccagtcgcgacagcgattaggcctgagcctcccgtctccacaatgtcttcccgggcggtgcagccgccaccgaagacgacgacgccggcgcccgcagcggccgccgacgctatgctcgctggtggcaagaactcgcgtcggagggtcaagaagtctgtagtggagaggccgccacatctcgcagcgccgacgtcagcttctgcctcccccgacccatccgccggcgcggcaggaggtcagccgtcgaagacgcagccgagcaagaatgctaggcgtgggctacaacggcggcagagcggcgctttaggctcgccagcgccgacggtgtccgcccaagggtctgagcgggccgcgtcggagctgctggcgccgactgaagacgtcatgtcgtcaccggtggcgattgctgtcccgacaacgcactcccggccgacccctcggctctcgacggtagcctcggcggcgaaggacgtcgctcccccgcctgtgcctgctcccggaagcacagcggtctcgacgacagcgaagggcaaaaataaggctcctcggacgcgggtgtcgaccgtaacggcgagcagcgaccccgaggcggccgcgaggaaggctcgtgcgctcgaggccatctttggcaaaaagactgcgcctgcgcccgtaccggcactggcaccgacgcccgagccttcaatcgtcccggcgaaagctgtcaaaccgcctgcggcctcgacggctgtcaaggtcgtccctccctcctccccttcgtcgtcgtccgcctcctcgtcatcctcctcgtcggccgcatcgtctcccagcgcggcacccaccccgcaaacctcaacgcccgcccgcaagcagcccgcgccatcgaccgcgccggcgctccctgtgcccgtcccttcctcgtcggccatcactgccgacgctggccttccgccgctatctgacctcgccgccttgtcagcgtcgaccggcggccgcaagccggccaagagggcacgcgtcctcagccggagcgcggccgagctcggcagtccggccgctgctctcaagggcaaggctcagcagcagcgtccgagcgaggttcagaagccggctgccgcagaagacgcggcgacggtcgaggttggcgccgacgagccttcccaggtggcaagcgtgcgtcactctcgtcttgtcgcgcccactcctgaccctcgtcactccccgagctgacgcctgcaactgtcgtcagcagcctctggctgaggttaccgcagtccgcacgccttcaccctcagccgcccttgcccaggcggccgcagtcccccttccgccctcctcgccctcaccggcgcagcgttcgccttcccctccgccacctgtccccgtcagccctgccgctcctgctgtcatcccgccgccgacgctcgccgcgctcgtcgctgccaagggccaattcccgtcggccccgccgtcagagtcaaaccggtcgaacgacgtttacatgcagaccccgggcgagggttcgtctgatgactcgtcttcgggatccgagaccgagtcggaggccgaggctgtggagccagagccggcgagccagcgctcaagccagcgcttcggtggtgaaccgctcacccagctgtcgtcctcccctcgcaaaggagcctcgcaccttgctgcgctcgaccaggccgactcggacgacgagaaggcggccgatggcgacgacgacgacgatgacgacgacgatggctcagtccagtactcagccgccgagtcggagcctgaggagaccggccgcgccgcccgtcgccagagccgtgtctcgttttcgcagctcttggcacggtctggcggtggtcgacgtgggatgagcgaaggctcgagcgacgaggaggagggcgagctgccgcccggcttggtggccgtcattgagccccaggacgacgtcgacaaggaagcgcttgatgctcccatcaccgtcgacgaagacgacgacgttgccatggaggaagaaccgatccagaacggctcgtcgccaatgctcaccaacgtcaccgcgccgtcgtcgccgatcgtcgacccgtcacaggtcctgcccgtctccggccagtcgacgtcccccgccgtcgccgccgccgctcgcgcccggtccgagtcggtcgcttcgtcggacgatgcgccggggattcctccctcgcccgccggctcgcactcaagcgtgccaaactgggtgacgcacacccagtcggaacccgtcccttcgtcacccccgacgacgactggccgtcagcggctctcgaaccttgccggcgtcacctcctcctcgccggccaagccgagcctgagcgagatcgacgagctcgacgcaagtcagccgccagcctcgttctcgcgtgcgaacgaggctctcgaccgggccttcgcgctcgacgaccggccctctccatcgactgctcctgccgcgacggcggccagggacagcatgcccgttgccgaggcgctcccgcccgcggccgatgtcgctgtggctgccgacgccaacggcacgcaggagaccgaaatttcggcaacgcagctctcgcagagagcgccggtcggtgagcctctgtcgtcgtcgttgggtggcgagagcgagagccagcccgccaccacgagtccgctgccgtcgacgcccaaggtcagcggcttggcgcccgccccgacgccttcggtccaggtcaacccgccctcgtcaccgaccaagccaaccgttgctcctgcccccgaggtcatagcagctgaggaggagatgccgccggtcccccagacgccagcgggcggtcggacgacgcgctcccgggccgccaagggtggtgccgctgctcccccgccggcaccgacgtctcgcgtgacccgccgggcggcgtcgcagcagcctttgcagacgctcgacgcgtccgagcctactgagcagcagatcagcgcgagccagccggtcggccgtcggcttcggagcagggagccctctgagaagccgacgcaagccgcggtcgagacgccacgggcgacgcaagccgcggtcgagacgccacgggcgacgccggccgggcgacccaagaggggcggaaaggcgcgtcagacctggcccatcctcccccgttgcgtgatcgcggaacgctgacgtcttggcatcttcgctcgactttcagatcaacggcagtcagcccgctgcctcggtcgcggaggaggagagccctgcggtcctcgccgcctttgaggccgctgtcgccagctcgcagccagatgcagcctccgccgaggaggcttccccggcacccttgccgaccctgccctcggtctcggttttggccattccgcccgtctcggctgtctatccaaagctgccgcccttgccttcgtcgcagccgacgcgggcttcgcagcggcgggcgccggccctgtcggacctctcgcagcggtccaaggccgagtttgccgtcgccggctccaatcacggcacgccaaacggtcgaccgggccccaaaggccgggcctcattcgctggcgcggcctcgtcccaggcggccgcctcgcagccgtcgcagggcgtctttggcaagctcgggcaatggctcgccggcagcggcggtggcgacagtaccgacggcggcaggagtagtcaggccaacggcggcggcaagccggccgacgacgacagcgactcgtcgagctcgtccgagagcgacagcagctcggacgacgaccggttggggtccaaggtggccaagagcaggctcgcacggcccgcgctcggccgcaagaagaagagcctgctcggcgcgctctagatctactccattcatgacactcattcaagaacggcacgctaggcgaaggggctgaaagatactcgattagctggtcgaaatacgcatcggtgacgggcgagcgcagtagggcggcgaccgacccgcccttgacgcgacctcagcccacgaccgtcggcacgattgcacccgatccctcttgcatgcagaccaactctccgcaacgccggctcggcaagttgcccggcgagctggccctctggctcctcgccctcgttgtcgcgctcccgctctcgacctgcggctcaacggcctgtcagctgctgcagctcgtgcattctcttgcagccctttgtcttcgctcagcgggcaagctgacagcgatgtcctgctcgtcttcagcacgacggccgctcaagaggctcgtctgccgcatgggccgtgtcaggtcgagcgaatccggagcatctgccgagcgaagctgagctgtcggtcgtcgaaggtcgaagcaggagggcccaccgccggattgtcagtggggtaatctcgtacagcgtcagttgtcttgcgcatgcgaccagttgcttctgatcctgacagtccgagctcatgtgagtgagcagaagccgcccatgctacccgacgtgccagaggcgcccgagcctgagcttcaagagcacccattgcctccgacacgtcgacgacgatcagcacgtccagcagcacattcagccccggaaacggatcagaataggcctgtacgtcggcaccaagacccagagcatcgctcttgagcttgcttggctgatcgagcttcatcctcgtcggctcccctaggccaactgcgagacgcgtacttcgtctcgccgcgttgcaacgcagggcgacgtagagagtttagctgtgcgtttgaccctgcccctgacgtgccgctcagcgtgtgtgctgaaattttcagcagacggacgagcaagccagagaggactggcgcgtacgcgacgctccttcgccggcatccgagctgcacgacctcggcggcaaaggctgccagtcgcccgcagccgagctgcacgatctccggctcgaggaccttctcaggatgcaagacctgagcttcccgacgcttctcgggcagaaggtaactcttgaggaaggcacgatgactgacaggcgctgacaccctcccttggcttgtgatcgcccgcgcgccgcagatgaaggaggcgcgcgacgcgacgacggcaggacccgtcgcggccgattaaaggcaatgacctttcatcttcgagagcgcacgaacgatgctagaggcgtctctcctgcttgtcgcagtcccagcatgtcaggcaatgtcgaggggcaggtccggcatacttcagcagcaagctcggcgatcgccgacggctaagcccagcccgacgaccgcgtggatatcgtcctcctcctcctctcctcccctccgaccacatctttctccgaccgatctcgccgatggtcgccgctctatcactcattgcctcggtatctactgccgtcctgcttgcgacgcaggcggcagctggccagcagcagccgtttgtcgcgcaggccggcctgggccagctcaagtcgctctcgtcctacaacggctctgcaagccttgcctctgtcgacgacagctcgtttacgactctcacccatcgcgagttctcgggccaccgcgtacggatcaaggagacgaccggctactgcgacccgtctgtcaggtgcgattctgagcgagccagaaccacacggcgacgcgaccgggctgacctccccccggtcgcaggtcgtactcgggctaccttgatgtcgactcgcatggcaaagaactcttcttccagtactttgaggtgcatgagcgtgagggacgctatctgaacgtttgcgcgtgctaacgtgcgccattacgaatgcagagccgctcggaccctcttaacgacgacgtcttgatgtggatcaacggcggtgagcaggcctcctgttggaccctgggacaaaagctgctttgctgaccccacatttgcctcctaaggtcctggaagcagcagcgccattggcttgtaccaggagctcggcccgtgcaagattgtcgacccgacccgactcaacggcaccgtgcgaccgacacctacctctccttcattcgcacacgagctgatgccgtggctcatcccgttcaattcaggagctgaacccgtactcatggaattcgaaggcaaacatcttcttcgtgcgtcgcaggagctttgcgtcgtcaaccgtgctgcagctgatcatgccattcgcacctgtacgccgcgcagctcgaccagccggtcggagtcggcggatcgtacgccgagaacggacaagaggtcgcgcggacggagcaggcggcggtcgacatccaggccttcatcagcctcttcttcgatacgttcaccgaactcaagggccggccgctccacctgacaggcgagagctatggcggccggtacctgccgatctttgccgccgccattcttgacggcaacaagcggcggaaggagcccatcgatctgcaatctgtcatcatcggaaatggtgagatctcgatctggcccacgtacttgtcgcgtcaggatgctgaccctcctcccctttcgcaggcgtcgtcgatcgcttcgacctgacactcagccattacgagaccagctgcacgagggtgacggggctcagcccggtcctcggtgtggcgcagtgcgctgcgatgcaggaggtcctcccgcgctgccgggcgatgatgaaggccgagtgcgaggaccggatggacgccctgggctgccagaacgccatcgaattctgctaccagcacctcaagtacccttactatgcaaccggcggcaacccgttcgacatgtcgaaaaagtgcgacggtatcaacggctgctacgaacagatcaacgccgacatcgccgcgttcctcaacctcccggccgtccgcaagcacctcggcctttccgaccaggccggtccctttgagggctcgagccgccgagttgccgagctcttccagggcgcactcgaccacaccggtgcgtcctccacgcttagagatgccgtcctagctttgactgattgccgattgcgttgccaccgcaggccggacctcgctctacgtcggcgccctgctcgagcgtaaagacgttcggatcctggtttatttcggccgctacgattttcaatgcggtgctcaacatcagctgaattggacacacaggctcgcgtggaccggtcacgacggcttcaacgcccaggagctcgagccgtggtacatgaaccgcaacgcaaccgaggctcgcagccggggcaaggaggccaagggcgagaccaagacgtttggcggcctcacgcttgcctcgatccgcggcgccggccacatgtacgtcgtcttaggtcgctcgtaaatcagagatctctcgctgacctgccccgtctcgctgctccagggtgccgtatgacaagccggccgagtcactcgagatgctgacgcgctggctcgcccacggccgactctgaatccctcgctccgctgactgctctactgcatctttatcatgacgcctggcctgctgcgaccctgggctggcgacagaaggagggcgaccgagcgactgtcccgtcgagacgcgtccactcgagccagccaaccggctcaaaggcaaagcgggggtaaatgcgctcgccctatcgaggaaaggcaatatgcgtcagacgagcgttgggtgaggcgaaggaattttcgaaagctcacgatcggtgacgactcgcaatgggtgggaagactggcagcgtcggccttatcaagcccccacctgatgagcttggatccgatgccgaggccctgcgaatcgggatgtacgacgaggccattctgcgaaggttccagagtcagtgtcagcacccgttcgtttgggtcgaccgagctacaccgcccgttgtcgcacgcaccaggtaccagtagggcctgccagcgtggtactcctctcggatcgtccgcgctcgcgtcttgaagtccttgataaacgcacggttctcggacgctgcaaaagtagcctcgagctcctcatcgacgctctcgacgaccttctcggaagcgtcgtccgacggcggcttcagttcggtcggaaggtatggcctctcccacttggcgaagccgaggatgcgtcccggcgccgagcgccgcgtcgccttcacatagtcaaagctgcgagtcatctcgggcggcaaccgccgctggctatagacaccccatcctgtcgatacgcgaaggcggttcgtcagtctgtttggaggcgaagcgaggagagcaacaagtcggcacgcactaacttgcgtttcgaagtctggccgccgtgcgaccggcgcgctcgtctcgttgcgcggatcaccctccatcgccagtagcttggtacgaatcacctctggccagtcggcatcctcgaccagggaaagaacgacgtcgtccgccgtcaactggaaggccggcgtagcgaccgagggagcaacagtgggctgcgcggtctctcgagccgcttcaaaggcatcaagagagccggccgtcgggagccgccttctgctgcctagcggagcggagggggaggacgccatggcggccgtcatggacgtttggccagtagcaggatcagaatggatgcaagaaggcccgcgaggagctggaagcaagtgagtgtcggtgatacgggagctctcgcagcagaagcgaggcagccggcggcgccgccgctgctaccgcaagcaagtcgacgctcactgcgggatgaggccagccgttgctcgtacttgtcaatatttagccggtcggaggtcttcgcgcggcaggtcgtcgtcagaggcaatagaagttgactgcagcaggccacaatcatcggtgcctcagcagccggagggcgccgcgcagcggcttctccgaaccgaccggtcctccctctgcccgcacaggcacgcttccatcctccttcagaaaagtgacgatcagtctattgcatctatgtattggcgcctgattggctgctcgtccccggcctctaggcagtcgtcttcttgggctggcggcagaacgacggtgacttggcagcggtaccgtcgacgtaggtccactcgagccagccgatcggctcaaagccgaagcgagggtagatgcgctcgccctagcgggaacattcgagtgaaggctaggatcagtgagcattcagggcagagctacagcgcccttgctcggcaactcacgatcggcgacgactcgcaatgagtgggcaagccgactgcatcggccttgttgagcccccagttgataagccgcttgccgacgcccagaccttgcgagtctgggtgcacgacgaggaggccctggataattatttggaatggcagtcagcgacgcctcgatcaactcgagtgccttcttacagtggcttcttcagcgacgtaccaggtaccagaacggtgctccagcgtggtagtcctcacggatcttgcgcccgcgcgtcttgaagtccttgaggaagacgcggtcctcgctggccgcaaagatagcctcgagctcctcgtcgacgcggtcagccctctcgctcgctggcgccgggtccgggtgcgcctcagtcgggaaacgcggcttctcccagacggcgaagccgagaattcggccaggctgcgatgggcgcgtggccttgacaaactcgaagtcgcgcgcaacctcgggcgacatccggcgctggctgtagacgccccactctgcgggccaaagagaattcggatcagtagatcccgagacgaagcagcacgtgtaatcctgagcaacgagagaggcctcaagtacgcactgacttgcgtctcgaagtctggccgccgtgcgaccggcgcgctcgtctcgtagagcgggtcgccgaccatcgcgaggagtttggtccggatcacctcgggccagtcagcgtcgtcaacgagagagaggacgacgtcgtccgccttggcctcggcgacgacgtcggcgcttggcttcgcgacgggctgcggcggacgctccatcgccagcagcgatagctccgtcccaggctggctgcccgcgaacgcgatgtcgccgacagcctcaaagagcgagcgctcgtacaccggcttgcccgcgaccgtcgcctcgaggtagatcggcagctggtccttgtcggcccgctcgaagccccaggcgagcagcgccttgccgacgccgaggccctgcgcggccgggttgacggcgaggatctcgagcagccagtaaggctggcccgcgtaacgcgccttccggcccttttccatggccttcttaaagcccttccagaaggtcccgccccagtgagcgtcgcgctcgatatcgatggcctccttggtcgcctcgagctcggcctcgtgcgcggcgtcggccgccttctcctcgtccgtcagctcaccacccgtcgccgtccggtcgcggggtgccgaccagatcgaaaagccgaccggcttgccgtcgacgagcgccgtgcagcggacagtctcgggtgagacggacgagcgctcgttgcctcggaccgtccagcctggaaagacgacggtcgcgcagccgacgctcaaaggtgagtcagcgcaggcgtcgacctagccccaagccgtcgaaggaaaacgcacggatccgatcttcgaccgactgccggggcccaggccacatggcatggtcgatgtcggtctcgttgaaggcgaggacgaacgtccgagcgtacggctcggcatcccgcgcggggtcgaacgggacgacggtgaccgccgggcgcggcttcttatcgctgctgttgccgctgctggctgccgtcgtcgaagggttgtgggcggacgtcatgtgcgggagagagggagatgcgagatgcggaagacggatcagaggcgagaggcgaggctctgtcgtcgtttatggggacgacggcgacctgagcagaggaagtcgccgtcggccgtcgccgcggaaggctccgcgacgccgcagtagtcagcaagcagctggcgcacgctccgacggccactcagccaaacacgccgcctcaagcagcgtctgtcgggtgcagggagggccagcattcaagataaagagatcggagggtcgcagaaaacaggacggatacatggagaaggcggagagaaaggggtggaggagggggggctgtcatccgggtcgaagaaaggcgcacaagggggacggtcgctttagctagcagcaagcagcgagacccgggaggatcgagtgaggaaagacgtcacgaatacagcaaggggtgaggaagagacagacacaaagacctcattccagaggaatatgcacctggaagaacgggtgcgcgagcgctgtccggacgtcgatccgcttctcggggtcaaagtggagcagccggcggatgaggtcgcaaaagcgctggccggtgatgtgctgctgggggatgatggcctggcgcgtgttcgtcgagagaagtgcaaaagggtcagcggccgccgagagtcggcggtgcagaagagagagaaaagcgcacctcgagcgtcttcatgcccttgagaaactttttcgaggccttgtcggtcgtcgcgttcggatagtcgagcttattgcccttgaagaactcgggcttggcgcggctgcaaaagtgcggaggtgaggaatggcagtcagttttttgagggccaggttcagcggaagggaaggacgcacgctccgcgccgcataaagtcggccggcattttacccatgacgatctccatcatgacgaggtgctcgaggttgccgtgcgtctggaagagggcctcgcccgtgaaaaactcgacgagaatgcagccgatcgaaaacatgtcgcacgggtacgaccagccgaggccaaagatgatttctggcgcgcggtagtgccgggtcgaaacgacggtcgagtggtactcgcgctcaaaggtcgccgagccaaagtcgatcagccggatgtcggtgttgttgagcaggagcttcttttcgtttggcgcagtctaggaggggtggcggcgagtgaactgtcagcgctcggacagagcggctggtacccagaagatgaggacgcactcgtgacggcactgaacggtaggacgagtcagcgagcaaaatgttttcaggcttgaggtcagtatggacgaggccgagccggtgcatgtctgctcggcagcacgttggcgatcagcgacaggcgacgaaaatcgagaccaaccggcgcgactcacaggcaacgctcgtcaagagctggtgcgcaaagtcttggatgtgggccatcgggaacgggacgaagctgttctccttgagaaagtcaaagacggacgagccaaggagctcaaagacgaggcagacgtggtttttgtgatcaaacacctcggtcaggtggatgcatttgctgcgaaggccaggcaagacgagcatcagccgagggcaggcagcaatgctggtggagggtggaggccaggaacagacttctcgttataagggtcgccccgcttgagctcgttgagcacgcgaatctcaattttgctcgcgtcgcgatacttctgtactgcgcggatgatcttgacggcgtactttcgctcgggctggcgccggtcgacacattcgaccaccttgccaaaggtcccctcaccgagcttgcggacgatccggtctgaaagacggggagagggtcagctaaagcggtctccagttttgacgcctgctcaaggcagacgcacagcgatcgtgaacaatgtcgcccatgttgatgatgtagtggccctcggcgtcgtcacacggcggcgccttgggcggcggcggaggtgcgacagccgttgccgtcctcgacgactgttcaacggaaggaagcgaagcgtcggtctggtgaagggcgctcgattagggctgtacgacagaacgacgcaccgtgccattgacggttgttcggctcgctttgacggcgcccgcgccaggctcctcggccttgcgctttctgctcgcgccggccgtcgtcgttggaggcggcagcgcctgctgctgctggtacgatgcaccacgcccggacgcgactggctggcggtacgacgcgccgttgcctccatttccagccgcagcggcagccttcgcgcgcgtccttcccgaaggcggcggcgtgtcttcgagaatgatgacatcgcggacgtctcccgtcggcagctggtgcttctcaaccttatagccgacggccgatgaggtcgagacagtcgagccggccacgcggggcgtgcgcgtcgtgctcggcaaggtcctgagcgaggccgacgtcgtcgccgaagaggcggccgcgtcctgtttgcggcgcgttctgttttgtcgaaggaagaacgtcagcgcgctgggaccatgccaaatcaagatgcgaacacgggcggggcttacctcgatgaggcgacggtcgttgcagagcccgttgtcgacgacgcggcggccgctgctcgggacatgtcgtacgaaggctggtaggttgaggaagggtactgatgagatgagccggaggccgtgcgatgttcgaggacgctgaagcgaggggggccggcgctggcgtgctgttgctgctgctgctgctggaccgagctcgggcgcgaagcggtcggcgggtagtggtgacgttcggagaggtcgagcgcggggtacgtctctgcgaagcgcgaggtcgacggcaagtgggccgggtactgctgctgctggtcgtgaagcggactgtagcgccgattgtcgcggtaggccgacgaggcgtgcgggaggtagtctcgagacgggcggttcgcagcagcggcggtcgaggaggaggcgatctgctcgcttcggtaggcgggcgatctcgaccggcggcgcgaagagctcgcagggggcagataggtctggcggccgtcagacgcgtagccgtaggttggcggctggctctgctgctgctgctgctgctgctgccggtagtaggatgacgaagaggctgccgatgggaagagggccggctccctgcgcggcgcggcgttgggggcagggacgaacgactgggcgtaagggtcgttctcgcgggcgagatggggcggcggctggcggaggtatgggggctggacggagctgtaagagtccatccaaggccgggttgtttgcaaggagtagggtcgacgagagggaggcgagcgttggcggtgcagagagggcgagcggaggcgagcaacgcgcgtgcagagagggcgcgcaggcaggcagggcagggcaaagctaggaaagcccagcctgtcgggccatctcgcatcgtccctccgaccgccatgctcagcttccctgtcttgctgacactgacaagagctgggagaggcaactggccggcggagggctgacatgccgtcagcatcggacgacacgcaccgacaggtcctgacgcgaacgagaagggctgcaccatcacatcgcctgcctccatgttcatccttccggtcaggacgccatcgtacggagcggctctcaagaaaaagagaaagagaagtcgcggacggactgatcgctagctctgcagtcggttgagcaggtacggatcctggtcgcacgggcgcccatcggcacatcggcaaacgcacagcaaatgttcgcgctgaggtcaagctactattatctgaccttctctctggtcctgcagcagaccgcaatccttcggatgatgaaaggactcgtcacgacgaccatacgcctcgcttgcactggaagagagtcgcttgtcatctggtgcaggagatcgtcgcgctttttcgcgcgccagcgctttcttccgctcggatcctctctcatatgtcgcctctctgcgaactcctgaatgcgaacttttcgaagacgaccgaggacggatgagtacttgcccttccggcacgccagaatacttgctcgcggctggccaagaatcatctacgcgcgcgcgtgtcgcccccgctgtcgacaggagctcctccagccagccagccagccagaccgagccagtcagccagacagccagccagacagccagccagccagaccaccagcactacctttctctccaccttccaacagccttccaagagacctcggacctgtggacgacagcagcaggaagggtcccgcctatgttcgtcaccaagctcggcgcccgagctgtcggccgtgctgctactggcctgccggccgccgcccggctcttcacctcgacctctgcccgttccgtcgaccgcgagtcggcgccatccaaacctgacgtgcccgagacgccggcaccgccttcgccatcggccgtcggctcgtccgtgccgctctcgctcaagactggcagcagtagcagcagcgccgggtcgaaggcgtcgtcgacggtcgccgggtcgtccggctcgagctcgccgtcgtcctccaagccggcattgacgatgacgacggccaagagcgcggcagtttcgcctgctctgccctcgatcatctcgagccggaccagcaagccggcgatcaagctcccgacgatcctcacccaggactggctctttgcgccgtcggcctcagcaacgcaggcggccgccgccgacttcgacccggacgcacccgactcgtcattatgggcgctcgagagcgagatcatcacctggttcccgccctcgcacccgcacatcaaccgttcgacgcctgctcaagcgcacgctgcctcgctcgccctctcccggagccgctcgagcacaacggcatcgccgacgggcatctttgacgaggacgaggcctatttcgcccactcgctcttccgccaactcgccgtctcgcacctcgccggccagtcgacggccgacaagggcatctcgcccgagggcgcccgggcgatccggacgatggccgactttgagcgctcggtccgcgaggccgacgaccggctcgagcagctcgaggccgtggaggagagcgaagggatccggcttgactcggtcgtccggaagcgtaaaaagaagatgtcaaagcacaagtacaagaagcgcatcaaggtatgtaatcgtcgcccatactttgcccttgcctgtcgctgactgcaccgctgttcgggctctcgactttgcaggcccagaaggcgctccggaaaaagctcggcaagtgacgagctcccggccaggccagcgcactagcccgtcagcgtcgggcgggcccgataccaatgaacccccattcctcttaagcgtctggttggtggcgctgaccttgcgagagggcactgagtgcgttcgcgtgagaggtgtgcgggggggaggggccgtccctttccagatttctctggattagtgacaacgcgcttcctatacatccccttcaattcgatcgtcgacgtcgagctcgaccggagcgacgtcgtcggcctcgccgtccgtagcggccttccagcggccttcgccgaccgcctcggccatcatccgctcgagccggtcgggcgagatgctccgactccgactgcgccagctcgctgccgacgacgacgagcctgcagaattggaccgcgaccggccggcgcccatccgcggcgagggcgagcgcgagatgaagcggccctcgtcgtcgtcgtcgtccgatgagtgcgagcgagcgcgacgccggccgccatcgttgtctgacccgctgccctcgccgtcgtccatctcgacatcgtccccctcttccgccctccctttgcccttcgctgcccctgctcgtcgctgtccctggcggccagcgtcgctctcgctccctcctccgtctgaagcgccctcgagcgcagcctcgagcaggctgacgcgcggggcgaggccctccgtctcctcgagcacggcccgcttcgtcagccgggggaggatgacgtcgcacacgcggtcctcaatcaggagctggtcgacgaactcgtccatgtgaaggagcgagaagccggctggaggtggcgccgagcggggagggcgcgcagagagggaggcaggcgggtcagctgcgtcggtccgtcacgccgcccccgatacggatgtcgggtcgagaagggaatggcggatagcagagagggagggacagacattcgtcacggtaccggatctttctgaagtcggcgaggagcggctcgaggatttcgtagacctcaaccggccggaatgtcagccggacgtagaaggcggcgatcgcacggaggtacctgagcgagcgtgcgcgaacgaacgggagagcgaaggcaagggttcagcatcagcgctctcgaaggtgaaggcaagcgcagaaggccgtcaaccgacttgaactcttctgcccgcaaatactccatcaggatctccttctcgggctggagctggagcagcttgagcgtcaagcacaggaactcggtcggccgctggttggcatagacgccgccgatggtcgagaggctgacggcccggtcgatgagcgtgtcggctgggtatgagtggtcgggacggcaggcgcgtcagcgacgaggcagagctcagagtctcgccgcccttgcctgaagccgccttgcaccagctggcagttgcaagctgaggtcctggcgactgaccagagagggcaaagcagtgctccttccagtagggcgactcgtagattcgcgtccggatgaccttctcgatcagggcctatgaggggcggtcgggagggggacagggtcaggcaaattgctcgaccgcgagctcgagcacagccactgatcccccgacggacttgggggttgacgccatggatgttgtggtagcccttcttggtcgtgttggacatggtgcggaggttgatggtcggcgggcggaagtcgtgcacggggttcgaccctgaccaccaccccgtcttgctgccctccgcctcgtccgacctcctcgtttctgccagtcgctcgccgagccgactgttagcagccgcctacagcacgccctacgacccgtcagcagcagtaggccgacccgccctcgtccgaccccctccactggcccgacgcgccttccacccgagccgccgccgtcgccgccgccaccatgtccgaacgcaaggtccgtccgcgcctccctcgctgtcctgttccgttcgcgagagcttgtcagcccggctgacacggcatgcatgggctcctctccctatctaggtcctcaacaagtacttcccgccgggtgcgttgtctctctcgaccgctcgcacctcgcgctgcgccccgccgctgaccctttcccggctgacctgccagacttcgacccggccaagatcccgcgccgcaagctcaaggacaagaaccagcagcagattatccggctaatggcgcccttttcgatgcgctgcaacagctgcggcgaatacatctataagggcaagaagttcaacgcccggaaggagacggccgagggcgaggactacatgggcatcaaggtgcgccgccttgtcgcccgctatcgtcagcatgctgctggcagacctggactcgaggctgaccacgctgcacttcctccctccttgtccgtatgcgctcgctcgccctatctgtaatacggggaccgccagatcttccgcttctacatcaagtgcacgctctgctcgaccgagatcacgttcaagacggacccgaagaacgccgactacatctgcgagcagggagcctcgcgcaattttgaggtgcgccctcgtttcgggcagttggaagaggggctcgcgccttccttgctggaccttgcgttgaccccctttgtcgtgtgcttcccttttcgctcgcctccagtcttggcgcgacgacactgacgcccacgcctcggcctcttacgtccccggcgccggcgaggacgatgaggacgaggaagagaaggagaagcgcgaggccgagcaggacgcgatgaagctgctcgagagcagcatggagagctcaaagcgcgagatggagattctcgacgcgcttcaggacattcggttcgtcctttcccttcgccttgcttggctctctccctcgtgcagagcatccgtctgactgtcacgctcccccgcttatgctggctccgcctttcatcaggacccgcaacgcccgccaggaacgcgcggccggctccgtcctcacgaccccggcccacctcgcggcccgtctcacgccggccgagctcgcgcggctcgaagaggccgaggaggacgaggcgctcgtgcgtgccgtcttttcgaggattcccgacccagcgtacgcccctgggccgtcgtcgtcggcggcggcggcggcggtcgatgtgaagggcaagggcaagggaagggccttgccggccaacgacgacgacgacgacgaggccgacgaggcggccgatcctggcggcgagtcggatgcctctggctctgctgcccccgagccgcccaagacgctctcggtcaagcgcaagctcgacgatgactccggcaacgagccctcgctcgcctcgctcctcgcacagaaggggctcgccccgcccggctcgacaggcagagcagcagccagcgccggcagcgggtttggcttcggggcggcggctgggttaaagaagaagaaggtcggaggaggaggcctcagcatcccggggctcgtgatcaagaagaagccggccgccaagtagagtcgcttgctgtggggtcggtcaggtggtcacattgtcggccgaggggtctgggtcgagccatgctttctttcttgttttcgctgaaatcgcacacggaagagcaaacgtcatgagattggtttgggagcgtgtcgtcatgattgggccaggggggaaggagagggagcggggtttacaggaagcggcgcttgaactcgcccataaggagcatggcctgcgcgtccgagtgcaaagacgctcgtcagtctcaacgcgagcggacgaggggataggaggtgagacagcgcaccatgctctggccgtaggccatggacgtgagcgggacatcgcggtagccctggagatcggagaagacgggcgtaccaaagctgtgtcgatcatcaacgtggccgtcagccgacgaacagaagcgagaggaggaaagcaagccgcacctgacgtctgcgagttctccatccgctgcgatccggccgacgatgcccttgaccgaccgtagcgcaatggcctcgtacttgtcgcccttgaggtagcctttgcgaagcgagtggagcatgccgtaggcgaatccggcggtcgctgagctttcgaggtaggacgagggcctggcaagtgaagaaacgagtgggggagcgcaggcgtcagagactgacatccacaagagcgaagcaagtcgtgaggtgggctgactcgttgatgagcgtgtgccacaggccggtcttctcgtcctgcatctcgacgagcgcgtcgacctgctccttgaggacgctgatgaggaagctgcgcaggaagtcgtcgtctgccgccatcgggtcggtgacaaaggttgtcggcgagggcgacgttgacgagtcggagaggagcgtgaggaactcggggataaagatggtcagccacgagtttccgcgggcccagagggcgttggcatactgcgagcggtcgagaagcagcttcagtcaaagatcggaagagcggcgagggaaggagtgggggctgacgttgtggccgccctcgtggtcggtccaaccgtgaaagaagagaccggtcttcttgtcctgtaggaacctgttcgatatcgcccggtcagccaactcaaaactctgagcagtcatgaagggcattgactgacttgatgtgaatcaggacctgcttcttcgcctcctgcacatactttggccggttgagcaggaggccgatcttggcgagcgggaggaccgtcatcatcaacgtgtcgtcccagagctggccgtcgtggtccgagacgtaggtcgtgtggcagaagccgcccgacttggtcctgggcgaagggcgtaaattagtccaagtccaacccgcggcctgtaatgatgagaggaacgaagggctcaccgcgggaggtcgttcatcacccactcggcccaggcgtcaaggtaagcgaggtactttgactctttggtgatctcgtagagatatgcgagcgtcaggaatggtgctaccgtgttgacgttctgtatttggaggcggtctatcagctcgtcattcggggctcactgcaggccgggcggcgacgcaccttggacggcgtgcccttggcaaactggtggtcgaaccagtccaccatcgtctggagcatcgccgggtccgacgtcacctggtacgacttaaggattcctggagacgacgcaaggggtttagagtcagcggcaggaggacgcgcgagcgaggagaagggcagacggaccgtagaggccgacgctgcgtagcgaggaagcgggcatcgccgacgggcagtagaagagcatcagccggctggttctgaggtctcccgcgagaggcaatgaggaaatcacccatgcgtccactcccagccctccatccagctcttggtgtcgacgaccttgccgccgggcagatggaggaggaactcgcctgcaaaaggcgcagaggccgacgtaacctcaggtcagcttccggcccggttgcccgacgacgcggcgcctttcaagatggatagaagtcgcacccgtctcgtccttgatgctgattacattcttgatgagtcgccggacgagctcgccggcctgcttttcgtctgggaggccgagcgattcgaggtaggcctcacgccggagcgtcgtcgagtcgccggtgaaggtcgtgccggtcatgccaaactcggcgacgtggccgttggtctctgtcgtcgtggcggcggtcatgctttgatagatgggaaagagagtgtgctgagagatagagagtgagatgatggtcgtcgggcaggagaagcacagggctgatcaccttcggaggagtcgtcgaacgtcgtcggcgggcggagcatctcttgccccggcggaccggttgcggcccggcgccggaccgccgtgtcgagcggtcgagaggcgacggccgctgaaacgagaacataagctgaggtgagggctgatgagcctcttgccccaagcgagcgacgcggtgctggctggtgcctaccctggtcgggccaagtacgctggcttgtgagagctgcgcacgaggcgtgacggacgaccggcagctcttccagatgcgatggcccttcctcgcatggatagcaattagcatgtccatgccaaggtcgcatcactcgcttacaggtcacctctagcaagcatactggccaccctgactgtcgcccctcgcagcgaatccgagctcaggctcacaaagctctcgcgacggccgtaccacagcccgaccatctcagccacacactctcgtcgactctccctcccgcctgcctagctagatcaccctcatgcgatcattccgtaatacgcggtcgcgctcgtcttggcctccttctcggcccgctttttcagaaactcctgtcgatcagctggtgggccgggcagatgcgcatcgtcgtcaaatccggcttccggccgacgaccatcgcttacacgttaggactgactggcctccttcttgtcctttgcgagctgcttcagctccgccagtcgtgccttcttggagaccgggtcgactccttcttggccgttgttgtcagcactgctgtcctttgggtcggacgaggcagaggaagagccagcgccatggttgggaacgagcgtcgtttgcgagtcggcggcttgggagcggccagcggaggaggttccgatgctaaagatgctcgacatggggttaggcacgtctgtgtgagggcagggatgcgtcagaggaaaggtgatggttggatgaaggtcgtcatcgcggcaggctgggcgaccgaactctctcggagccgagacggtcttggcgggcgctccctgcgctgccattcatcatcgcgacgagtcttgcgagcagccattctctatcgcaagccacctgaccgcttgagaacgccgactgtgacagcaacgccgagagcaaagccgccaacatagggcgcggcccgggtcgcccagccgaggactctgctccggccctttttccaggcgctcgtccggccgctcgtgacgtcgtcccaggtcctcgtctccatcgtctcccagccctcgaggacggcgtccatcattcggtcgtccatcagcgagagctcctctagcgaccacgcgtccgagacgccaatcatccacgccatccggcgctcgccgagcgggccgccgacgcctggcgcccgcttgcggagctcggcccggagccggccgacattgtcgatggcccgctcgacgtgctcgggcaggctcgactcgatccgcttgcgaatgagggcggcgatccgtggcccgcggcccgaggtcgagaccatgacctggagagggccccggcggatctgcgagccaaagtagaagtcgcactgcggcgggacgtcggcgacgttgacggggatctgagccgtccggcagagcgtgcagatgtgggtcgacactggattgttgtcgattgccgtcaaaaccatgtcgtactctacggcgaaggagtggaaaggcgtcagtcggcgggtaaaggggggtcggcgtacagcttggaggacgtacggcggagcgtctcgccatcggcgtcctcccactcgcgatcgatccagcggtcgacgagaccctcatcgatccgatgcttgacctcaggcgtgagaccggcagcgggcgcgatcagcgtcaccttggccccagcctcgagcaggtagtagagccggccggtggcgacggcgccgccaccgacgaggagaaccttgcggccgagtagacgccaggctaagcgaggtgcgagtgcagcgaattgaacagcgtagacgaagtcgaccggcaggagcgagcggggcgagcgtgaggcaggtgggatcgaggtcagcctgccgccgcgataacgatgtagggccgagcgaggacgggacggaccgagcatgaacgaggtgccaggcacgatcggagcgaacgacgtatccttctctgcgtctgccatcctgtgaaagtcttctgtagaacgagtgctgaagaggggtgcggaagagagtgagcgttgcgagtgaggcgagacgactcgacgtggttggccgacctcgtctcgtcctcttgccctcgacagagacccctcgactcgccttcatcctcggccggtctcacagaagcggcctcatgtagagctagcgctcgagaccctctgctcttctgccagtcaccgcacttcctggccgaatggccctagcatcactgccctgttcggcttgccactcgaagccggtcgccatctgcgcctcctgcgtccgcaagcggttcgtcgttctcctcattgcctcctcttcctccgctccctgctggctgacagagaggcacacatacctcttccaggctcgctcagcataagaaggccgagtcgacactcgaggcctcgctcaaccgacacaccgcccgagcaagcgcagcgctcgctggcccaggcgggctgaccgaggtgcgtgagctcgaggccaagctcgccgctcgccaacgctcggtcgatcttctccaggtcgagatcgaacgacttcgggccaagctcgctgcgggtgtgtcttggctaccgcggctgtcaattggccatccagctgacaacttgaccgtctgctcagatcaagcccggctcggcgcgcagcggacgatcctggccgaccgacaggccatgctggcgacgctcgaagccgctccatcagcgactcttccgcgcgcgctgctcgagctgcagctccggtcgcccgacccgtacgcgccggccctcctccagacgcggcaggtcctcctgtcggagctcctccaggtgtttaacgtccgcgtttatgccgacgactcggacgatgacgacgatgacgatgaggacgacgacgacgaagaagaggaggacgacttcttcaagcggagcgagggcgaggaggtctccccaccagcggcaccggccgagtcctcgggcggccgacgacagcttgggggcaggggccgcggcgaatggatgatcgccaacgggctggtcgtccctttgcccggagacatccatcgtatgttggcgacagccattgggacccttgcgtccgacagtgtcgttgattatcctcctccgtctcgctctccagtatatcctgcagaacagaccaacgctgccctcagcgcgacgctccacctactctcgctctttgcgacgtacctctcgccgccgctcggtctgcccttcgtgccattcctccggccgccatcgctacagccctcggcacgcttttcaccaaacccactggcggcgacgcccgacctggcagccctcctcgctcgacattcggcccgaggtgtcttcccgctccaggttccacagcggcaaccggacctgctcctcgccggcctggccgcgcttcagttcgacgtcgccttccttgccgcccacgtcggggtcgaaatcccgctcaacgagtctggactcctcctctacaacctctatcgtatcgcgctcgagctcggctcgcccgtaacagctcgcagtgcagcgactgtcggcggtggggtccaggtcgaagccgtcagcctccagcgcatcgcgctctcgctaagaggcacgctcgcctcctcatcgagcggcgcccatccatccgccatcggcgactttggcggcggcggcggaccttcgaccgaccgatctcgctcggaacagcgccgcgcagaggcgaaggacgcacgacggcaggccaaggacgccgtcaagtcgaccgagacggccgaggagcgtgacgagcggcggacgaggcgccgggcgaagcgggccgagcgggagcgtcggttaaaggagcgcgacgactgggagttggtcgcgggcgactcgctggagagcatccgtcgtgaatgacaagaagcttgcatcgagagagatcgaagctcgccgactgcaggcatctagatcacagctcgtctcgaggacccgcggcttgccggcctgcaggccccctctcgaccggccgctgggccgcctcgtacgcctcaaaggctccgttatcgggcgccgtcgcaacctggaccgaccagccgctctcggcctctgggtcctcctcgagcgtgacgtagacgaggccatttgcgtcgtcgtcctcgtcgagaccgttcggaaagagggcatagaactcatcgtccgagagctcttcgaggttgaggtcgacaaggatcggctgcttcttggtccctgccggcacaccgccggcggcaacgtcttcggccgcttctgtatgcgcgtcgatgacggcctgcgagagccagctcgaaaggccagcgagcgggtcggccgccggctcgtcgtcagcggcagtgccttcagcggcaggaccagaggcggcggcgtcggcggcggctgcctctgccgcatgctgagcggcgagctcggcgcctgctcgcttgagggcctggaaggccgccgcccgatcctctccgtcacctacagcgccgtcggcgatagcgagcgcgcgcctgagcagttcgttcaagctcgactcgagcgactgcgaggccgtctgctgggcgtcgtctccggtctcctcggtcgagcccgcaggctccaccggctggttgaggacggccgtctggcctttgaggatcttggcccacttggcctggatggcttcctgctcaggcgtccgctccggcttctgctgctgctgagaaggagggctgtcgggttgatcaccggcggccgacttgaggcccggcggcgggagtagcgcccaggacggcagcggcgtgcgatccttgctagtctgagtgaacgaaagggggcgcttgtttgcagttagccagatcgaattatcacagaaatgtgaggttgggatcggcgactgacctcggtcgcgccgagcacgagtcgccgctcgacctcgtcgtcctcgacaatctcgcggcacgccacctgcccgacctcgcccttgccccaatcgcccgagaagcccgggacgccacagagccggggcgtctcgatccggaggacgtaagagcacgtcgctgtctctttgatgagcgagagggcgtcggtgcctcgcgaggagcagtgatactgggcgagcggacgagagccggtcgggcgcaagagttagccaagagacactagtctgtcagcggtgggcgactcgtatggggatccgatgccagccctagctctcgcacctggatttcaatttcccgcgcgtcgcccgtctggtcgcaggtcgtgcctccgccccagcgagtcgtcaggtaacgcgcaccagcgcctcgggcgagcgtgatgggtgcgatcggccgccgggcatcgtcttcttcgtcctcgtccgccgccgacgttgacgggccgcccgtcgacccggaccgagggtcgaagtggggcgcgcgggtgcgcgatccgaggttggatgatgggttgaacgaggtcgagtcgaatgactcgccgtaaggcggcacagtcgcgcgctagagtcgtagggcaagacgatgcgtgcgccgtcagcggagaagcacgggcccgaagcgaaagagggagcgacgcacgccgagtacgtaatcgtcatagccgtcgtcgatgaccggcacccaagcatcggctgtcggcggccagctcccgcgggccttctcgcggaactggcggacctcagcattgtggcagtagctgtaggtgaaccagcctgcgcggacaaagaggcacgagctcgagaggtgccggaggagccgttcgggtagctcggggtcgaacgccggctcgtcgtcgtcgactggcgcggtcggtgagggagaggctggcgcgtcgggttctggaagcggcagcaggcagaggtaggaccgggagggagggaggagaaacgtctggagcgtgtggtcgccggccgacggcaggccatcgccaccgtcgcgcgtctgactttcagaagcagcgccgagcgagatcgtgtaatcgtctccttccaggaccacagagccggcgatctcgcccctctgcgccgtcgaggagattgggccaggtcctgcgccgaagaaccatccgacgtcggcgccggcggccgagtcgctcgcggcgtgccgtccgagctccgcctggcttgacggcgggccgctcgctggcttctcacgcgccggcggctgcgttccctgttcctcctgccgacggacgagcgcgtctgcgaacgagcggccgatcgggaggtcattgaggaacgagagagcaaagcgagggtgggcaaacgggtcgggcgggaccgagcctcctgcgccgccaaaagccgggccggccgacgacgctgggataagactgagcagggcgagaggcaagagaccgagcatcactagtgctaaatctgacgcgcgatcagaggcgttttggaagcaaggagcgagagggtcagacgagatcggctgctggcgggcgtcgcgacgcgaaggagcatcagcaggggcacaccctgagccgccgccaaggagagtttttcgcacaactttccctcaccaaatgacctgcgaagcaattgtcctgcgaagtagttgtccgcttgtcttgtgagtgcgggctggtgggctggacgagatggaaggtcgaggtcgtcgctgtcgggctgccagcgcaagcgcgtcgcttcggtcgggtcggcgagtcgggcggtgcgcagcagcagccaggtcggaaggacaagaccctcccgacctccctttcccgccgacaggatgaagctgggctctgcactggattgtgaagctcgctctggtcgacaagaggctgtccggtccctcgcctgtccttgagaaagcggatccctaccctcgtccggatccggcctggtcgtcgcaccgcgtggtctgcttggtcgcttggcctcttcgactttcggcgcgcccgaacttgttgaccggtcgacgcgccccctccttcgctcctcccaacgaccgtcctctcaccttaacccctcttgtagacacaccatgcagcaggccaatccgctcgtcgcctctcccgctcgcgaccagaggcggtcccggacgcccttcaccaagcggacccaccaccagcagcaacagcggccgcagccggcgccggcgccgcaaccggctgcgtcctcttcttcttcgcctccgctcgccgcccttttaccctcggccgtgacgcagccgtcgccgacagcacgcgcgctcgtccctgaaggcgctgatgcgcttcggcagcttgccgagcgggcagagatcgtcaccgtccgaagcacgatccaggcggccccgacagccggctcgaggttcgtcgcgagctctcccttgtctccgagtcctccacgcggtcgccctgtacactccttcggccatatcgtcgcgcggctatctgacttggtaggtcggtccagagaggacgaaactgactcatgctgcttctatctacctcctctgctcccgtccactcccctcccgctcgagcagcaaggcgacccccgtccgtgcgtccaccttcccactcgtcgcgtccactttaccctgtgggccagatcggcggttaccccttaggcgttgagcgtgtcgtctgccagtcgctaactccaacacctattcccgttctgctgcgatgccttgctgcgccatcgtcttcgccgctcgtccacctcctggcacgcccatcgtcaccctcgggacaatctgcagccgtcggacccatcgttggtggtgtcctcgccggagtggctgtcgtccttctcgctgcaggtgtctggtggtggtacgtctctccgctcgtctgaaaatccccgcgccgctcgttgcagaagggctggcaccaatgcccaaacaacacacgctgacacaaaggacggcgctcctaacgtttgggtcacgcaggtgggttgccaataagccgcgtcagaggcagcaccagcagcgcacccgatcattgccgtcgacgaaggccggcgtcgtcccacgtcagtaacaaagctcggccggtctcctatccgtcactcaacatgaagactgacgtgcggccactttgctccgcagcgcccgtctcgtacgcccgttcgcggccgtcgacctcgtccgcagtaaaagggtcgctcgagaaggtgcctctcacgacgctctcatccggcgctccggcggcgctcgctaaagaccgcggaggagcgcccgcttccggcggcggaggcggcgcctcgcgtaacgtctctggctcgtcgaccgccccactcgtcccctccggcgccgactcctcgtcctcgcccgccacctcgcccgtcaagaagaagtggtcgccagcgacgccgagcccgctcgcgctcggcgccgtcgtctcggtcccgtctgccgttggtgccgacgtcgtgcccgagcctccgagatggggccaggcaccctttgcgtcggtccccgcgccgtcggcctctggtggaagcggcaagcgtgcgtcgggtcacctgagcgcctctggccactcgcacggcggctcgaccgacggcggaaactctgcgagccacctttacgtcccgaggagcgcctcgggcccaatctacgaggagggcggctcgtcatcccagggccaccagcagaaaggcgggccgaacagcaaccgctactcgaacatctcggacgcctcccgctattcgcagccggatggatacgaccgccgcctttcgtcgattagcgacggccacagcgcaaaccacggcggatggggcggctcgcgcggccatgaaggctacgccgctccgccggcgcaagcttacggcgcaggctacgacggcggtagccagtacggctacggcggcggccagtacggtgccggccattacggtggcggtgtcggcgcggcctacagtgactcgtacgcgacgggcggaccagggaacgacggccaggagtatgtctctgaccgacggacgagcgacggttaccgcctagacacctactatcagccgcagtagatctcggatctgaagcctatcagtcccatctctcgaaaagggcgaccaccgagggcctccgccgccgacccaatcgggtctcactcgtcatcctcaatcatctcttcttactactctcctcacggacacttttcttcctccatcctctctaccgcggcgcgctctgttctcctccccttcccctctgctcttctcctgttcctcatcccaaaatcacctgcctcccgatcgcaacgtctgacgttctgtcgccgtcccgtcccccgcccttttatttgttgttcgctcttgcttgatgggcgtagtttttctctgctcgtacctcgccccccgttttcttcacgctcttgctcgaacagagcgacgtcgagtttaacggccgtgagtcggacgtaaagtcgctttcgtcggccgaagtttcggcgcgcagctcgccgccagcgttggctcgccctcctttggccttgctcagcccgcccgtccacaaccaccatcgcacgacacacctgtccaccagcggaccttgtacagctcgccagactgcctttaccgcaacgacaggcgtagccgaggcctgagctagcagatgccggccaccctcaacccgcagggctctacgccctccctcgaccggtcgagctcgtcgtctgccgcaacgccagactctgccctctcctccgactcacgcgtcggaccttcgaagggcgagatctgccttcgctttgtcgacccctcatccgactggccagctctggccgaggcccgactccgggcctttgaagggacggcgctcgacggtcggtttgccccggtcgggcggcggccatcgctcgccgagcgggtcggtgagtgttgacggcttcggcgtgtgacttttcagggagaggcagcgtttgctgaccctattgaacctactgcttcctccttctagctgccgaagccaggctggcgcagatcgacgcccgcttcccaacgccgggcgccattcacctctgcgcgacggttgacggcgtgcccgtcggtctggcgtcatttcagcaccgaccggaccggcgagccaactcgggcgagccaaccgaggaggacatttcggacgctacggctcgtcgagcttctaaggaggctgcaaaagaggagcaggaccgggtctacgaacagacgctcgacggcgaattcagcggacgttttaaggcggcgctcgagagcagtcgaaggtcatgggctgaaggccgggcctactggctcctgtcggtgctctgcatacatccagactatcagggacgcggcatcgctcggtctctcctagcctggggaatggcgcaggccgacctccgcggccagacaatgcttctcgagtcgagcgcagtggtgcgccatcaggcccttgatcgctcaagcttgcgacctgaccgctcctttactgccctcctcaggcccagccgctatacgcgtcggaaggctttgacgtcgtgtcgaccgtctcatggtctgccagcgacggcatgaccttctcgatgcccgtcatggtccgagcacctcagccgaggtcggccagtcttccaaagccactgccagtcatccctcgtcccgaggtcgtcatctcatccgtcacggccgacgactgggccgatatcggtctcatccgaatcctctcgctcggcgccgaggggaagctcttcagcaattgccggccgaacgaccgtcgtttgccccttgcgatccgggttggtgtgtcgcagaacagtaaacggagtgacggccgccaagtctgacgcattcactctctccctctcacacttgacagcgaatcacgtccggaaggagaagctagacgctcggtttccgacctgcgagaccacgtacgtcaaggcgtcaatcgccggccggacggtcggctttgccctctggcaaacgccagtcaaccggtccgcgacacagggccgactctcaccagaagaggctcgccgtgtttgcgagattgcagcctcgcgagacgccgccaaggtcgacgccgactggaaggccgacgagggcttcgacgccggcttctacggccgatggaccgctgctgccgatgcaaaacgtattgaggccttcgaaggcaggccgcactggtttcttgagacgctcggcgtccaccccgacgtccaaggcctaggaggtgcgttcgtccgcaacgcaacagctgggcagacgcctcccactgacgccctttgttttctgcagttggccgcaagctcgtcgagtacggcatggcacgagcagacgcggccggcgtgccgtgctggctggagtcttctcgacgaggacgacccttgtatgaccggctgggttttgtctcgctcggcgacattgccgtcaccatgcaggacggcgccgtcctcctcctgccgggcatgattcggcctgtggcgcctgccctcaggaccgacgtcgtgctggccttcgtcgagcctgagaccgaccgcgcggcgctcgcaagagttcggttgcgcgcatttgagcggtccgacatggtcgagcatcttttcccgcaagacacccagccgacgctccaggagcatatagacgcgacgatccggcgcgaggcgctcgccgagcctttcctttcacccgaagtggtccgcgtaaaggcgagtgtcaatggcgtgcctgtcggtttcgccaattggctcggtccggtcgaccgaacgtcgacaagcggcgatccgctcgccgacgaggtcgcacgcgaagcggcgctcgaggcggccgtcgaggcggcaaagacggacgtcgaccgggtatacaaggccaagatcaactcgaacttctacgacgccgtcagccgggcgttcgagtcctcgcgcaagcaactctttgccggccggccgcactggtacctcgagatgtgcgccgtccaccccgactaccagggaaagggcgtcggcagggcccttcttgactggggtctggcacaggccgatcgcaacaatctcccggtttacctcgaggccagtcacgaggtgcgcgcgcgcgacaatacaggtgctgctcgtccgtctccgactgacctttttgcgcttctctgaccagggcaccgggctctacacgtcgcgcggcttcgacgtcgtcggccagctcgacctgtccgagggcgtcgtacatccggccatgtgtcgccgaccgcggcctctgccggagggattccgcatgccgccgccgagcctctaatctctaagtgacgatctgtcctcggcgcagagcgtccgtgtcagtcatcgctcccgattgcgcggaccatcagacgtcggcgctctgcatgtccattctgccttcctcttgaaatgatcagacgggcggcgaggcgaaggaggatccggccaggccagccgcctcatgcgctgtgagccggggaggcaggagggagcaggcgtgtgtcacgcctactcggctccacgcgagctgtcagcccaccgtgacgacgctaagacggaaccgtacaagaggtgtcctgccttctgacctcgcttctcaactcctaccatcaccttcaccgaccttgcccgcaccttaactcacctactgcagctcacgaacacccacacttcagctcacgaatgaccggcctcctcgacaaactctcaaacgcgctctccggcggcggctcggatccgaataagcctagcaaggccgagttcaaggcgatggaggagaaggctcgccaggcccggctcgacgctctcgaggagcaagcgcgggctcgctgtccatcgcggtctctttggcaggccgtcctgcccttggctgaggtctcaagctgaccggctcctgctacctttgtgtctgccagtcccgaacgccttgccaaagggtcaccccgaccgccaggagggccaggccatcttccccgccaaccggggtgaggcgatggccgtcgaaggcagctgtgcgacgtgatctctcctagttgactgttagaggacgagccaccggcttccggttgcaagcccgtcaaccgcttgttcgatcttttgctccgccttctcgctctcaatgggcttgccaggtgcgtcaagagctcagcttttgctcaagagagacgggacgctcatcgtactgctcagactctgcgcagggacagccctcagccgatccctcggctgacgagagctcctacccagcttcatcgcggctgctgcaccttactgctgccagactcgcctcggacctgctgtacaattctgcgaaccctctagcctagccttcctgtatccaacttctcccatatgtatcctgcgactgcccttctatccttggatgtcactccttgggcaggcatattctctcgctccgtcatgctggcctcgagcccgcgcagctgccgaaactgcaagcttagagagaagcaccgccgccttgctctcgacgttcatgactgcagggcgagagagcaacgccggccctttcacgtcatcgctggctggcagctgacgcgcaggtccgtccaagccgctgcaggttgcgtggcccgcccgtctttgccggccgccgcctctgtgcgccccctttcctggcatcgcttccgcccgaaccggcgcctcgcggcttagctcgctccaccaacctctgccgatcacgtcgtccttggctgacctctggttccggactagagccggcagggcgacaggttacaagaagacgccgacccgagctgatcgttttgccaactcccaccatcacctctgccaccatcacgacgcaccatttcaacgcaacaactgcccactacccgccctcccacctccaccacactcgaagacaatgttcgacaacctcgtcaaccgcctcaccggaggtacggccgaggaacgagcagctcagaaacaggtccgcgaggccgaggtagctggtgcgtcggcttcctacgtgaggtgatgtgccgaggctgatcgtcctgcgatgttgtcgcgaccgtgcagctgcccggcaggctcggctcgacgagtacctggacaaggtgcgagccggcctccccttgctgcgctcgcccacctcgctgacccacccttacccgcagcgcgaagaccggatggaggattatcactccgggcggatcgcccgggcaaaggccaacggcgtggagctcgacccggagtctacgcagggttccatcggtatcggcgacagcaacacgctcggccgggcgctcggcacaaacggcaacggaggctcgcgaggtccatacaaggcgtagttttcggcccttcgattctccccccccccccttccccaatctcttcagcttctggccatgttgttgtttcatccattggatctcgtgaaagaagtgctaggtgctacagaaggtacgataggagtgcagggggtggttgatggtacaaagccgagcgagaagaacccaaattgttgatcgtctccgtctctagccgaggaagccctttgcgagatcgagcgccttcttggcggcctcgcccttcttgccctcgccgacctccttctcgaggtccttgcgaaggccgtcaaactcgcgcttgacctggtccttcatcttctggatggcctgctcccactccttttgcttggcctcggccgacgcagtcttctcgccagccttggcagagtcctttgcggcctccttggtcgacgcgaccgagggcgcctcgtcaatcgtcttctggaggttgtccgtcaggcgcgtaacgcgcttctcgaggtcaccagagaagttgccggcggcagctgtcgaggtgcggaagagggcagagtcagcagcctgctcgggagacgcggaagcgatcggaaagacaagattggacggacacttgagcatggtcgagagcgactcgatctgcttcttcgtcgattcgtactgggccttgccgtccttggcggcgtccttgccctcgctgccgagcttcgctccggcctgggcaagtgtgaggctgaggaggctcgcgagcgcgggcgagaagcccttgacggtgctgacaaccttgtccgagtcgacgaggttggcggcaccctcgagcttgccctgaccgacctcggcgagcgaccggacctgacggacgagctgctccgtgtcaatcttgccgcccttggaggcgacccacgactcgatctggtcggccgggatgccagccttcttagcaacatccttgacctgcttgatgatgttgtcgaggtcgtcagagtcggctgcaggcgagtacgggggcgagcgggaaacgtcaatagggttcggcctcgatcaaagatcatttagcgcgaaaacgagttactcactctccttgagcgacttgataaggtcgtcgagcgagcccttcttgtccttgttgatctcggcggccttgctgtagagcttcttagccgtgctctcgagctccttgagcgagtcgccgccctcagccttgatcttttcggtgatcgacgaccaatcgcccgaggcgagcgcgagcgcaaacggtcccgaagcagggatcgccttctggatgtagctgatggcgcccttccactcgtcgccgacgtgttcctcaatgttggtgaggaggctctgcaggaagaaagtcagcctttgctccccgctcaatggaagtagacgagagggacgcaccttccagtcgacatcctggaccttgcccttggcctccttgagggcgctctcgacctgagcgacgtacggctccacgtctttgccgccaacctccttgaccttgcggatgaccgagtcaacgtccgagttcttgaagtcctccgagaggccagagacaaactgcgagacgccgccgtgctcgttgatctttgcgtagagcgtctgcgagatggcaaaggccgggccgagaccggcgaggttggccacctgcgagccctggaaagatcgaggagagcgcagaaggtcagctggctgaagctcattgaaaagctctgagtcgcttagcagaaggacggacgaggttcgaagcctgctcggtgcccgtcttggccgtgtcgatcgcggtgtgtgccttctgggcgagctcccggatgggcttggtgtagatgtagccagcgccgatgcccgaaacgaggacaccgagaacgatccacatctggccgagttggtcaaaaaaaaggacgggtcagcgaagggagggcgacgatgcacgcgtgagacaacgacgcgatggaggagacgacgcacaggagtgtggctgtggacgggcgaggccgtcgtcgtcggctgctcgatggcatacgagcggatcgtcggccgagcaacgcgctaggatgagcacagggcggcgaaggtcagattccatgctctgaaaagagtcggacgagcgaaagagatgcgaagaagggacggacgggagccgccgacgaagcgatgggccgggcggccgggcggcttgcggcgaggcgggtggcgggccgggcgacggcgttgcggaggagggacatggcgcgcggaagagaagttgaggagggtgaagagggtagggaggtgggtgttgatggcgagtcgaagggaggcagggccggacggggtttaaagccagggctgaagtcggcttggagggaatggacgcgcgtcatggctgcgtcagagcgtcgccgcgcagcagcacccccaacctgcgatgtcgccgggagcagctcggccgagcggtcacatgccacttccagctgctgccagccaaggtcggccagcatggcggcgactcttgccagtgccggtagtagcgtcgaacttgtcccctgttgggtcgttgtgcgccccttctgctcaagcaggcatcgcgtgcttttgccctgcacgtcggtatcgtcctccgaccttcgcaggacgaccggaacatctatatgagacggtctatttcagtgagtcggagggagaacggagggcagcagcaggtgcgggagcgaaagcaagagggtggtgggggagtgggcgtacaacgaggtagagctgcgaggcaggacaggctggggctgaggtgcaacagacgacatacagggggagcaaggagggtgcgaagcgttggaataagcccaagagatatgccaagagtgtaacgagggagaaggaagggagagcccaaagagatgaaaagggagacagtgtccagcgaccgcgtttggtcggacgctaatgagaaaggggtctttttgaaaaggagctgggcagatcagtaagcgttggccgtttcctgaaaagtttgcgcgaggggcggtgggtaccactcggcctgctgtggctgctgctgctggtgctgctgggacgggccggctgagtgcatgtaaggcgaccctccatcctgctgctggtgctgctgaggagcgtagccgttcggcccggcaaactgcggctgcggctgcggctgaggcggcgtgtcgtagtaggcctgaggcggcgggagccgtgccgactcgcctccatagtcgccctggtcgaatgaggcgtactggaccgaaggaagctggacattgttgatgccgaggcccgacatggtcgatgtagggccgggcgtgtatggcgaccgatcggcagggagactaagcgacgctcctggcggaagaggcgagctaccttgctgctgctgctgctgctgctgctgctggccgtaaaagctgctcgaatgcgagtgagcgggtgacaccgccgggttgatggcgccccgaggcgggtgcggcgagagggtgccagcagcggcagatatgttgccatcgctcggatgaccgccgggcgggacgcttccatgctgcgagtgcgcaccgccagccgaaagcgtcgtgtgcatcgagtgggccgagtggatcgactggacggatgagtgcctcgagtggaccggccggctgccggcgtgcgagctcgagctcctcgagtgggtcccagaggatgagccggacgagccggggtgacggatcaccggcggcggatactggacgccgagctgctgctgctgctgctgctggcgatacgcctggcggggtgacggcgcttcgtagctgagatcgacgtggttgggctgcatcagacggaggtcctcgtcgttgccgtaggcgtagcgaccgtcggccgaatactgtgtctggccgtagggcacctgctgtaacgggtactgctgctgctgcgggtagtgcatcgacgggttctcagggtacagcccggattcggaggccggcacgatcggagggaggtagcccacaactaaagactgctgctgttgataaggctggtaatgctggggctgcagcggagccgtctggctgtaggcccgtccagagtcggtctcgtcgtcctcgtcctcgtcctcgtcaccgctgccgctctcgcccgcgctgccatccttacagcgccgggccgccgagtccgcctgcttgcgggcctcgcggtcgcgccgcatcgccgcggcagacttcggcagctcgacgacgcggccgcactccttcttgacgagcaggtggcgccggagggcgtctttgcgcgtgaacgcctttgtgcagtttgtgcacggccagggccggtcctcctcgtgcgtccggtggtgccgggtcaggtcgtgccgccgattctacgggcaggacgaacagacggagtcagccagggatgaccttgaacatgagcggcggccggagacattaaggacgcacaaagctctgcgtgcagatgtcgcaggcgaacggccggtccgtcttgagcaccttgccagactgcatcgacgaggcgccactgctgctgctcctgcctaacgcggcgtgcgacgtttgcttgtgccgcttggcccgccgttccggccgctcaacctctccgcgggccaaggacgggcccgaggtgtgcgtcgacgacggcggtggcgtcagtgccgacgtccgctgcagaggtcgattgtcgtggccgtacggcacgatcgccggcagtggctgctgaagctgaaagtcgaccggcgtcggctggaacgacgcctggtagcgaaacgcctcttgcgcatcctggccgtcaccgccgccggggatcgagatgctcggaggcagtaggttgaccggcgggtgatagtcgtagtcgtcgacgtagagccgagggtcgttggcgagcgacggcagcggcgtgtggttctgcggcgtcagggggtagagcgagtgcggcgtcgccatcgtcgaccactgcggccggaggtacgacccggcgtcggttggtggcgggccccaactgacgcccgacgactgcgtgtcggctggcgagggcagggcctgactcgctcgtggatgtgaagtggtctctgcaggtgttgaagccgtcgacggctcctcgccccacgtcgtcgttgtcgtcgtcgtcttctccgtcgtcgccgtcgccgaagcgcgctcgacggagccatgaggcgtcgagaggccaccagcgttcggcgaggcagccgcgcctgagcagcagcggagatgccgacaaaagtcagccgactgtcgctcagccctttcaaaaagggcaagaagagagggaagaccgactgtcttggttctgctggcgctcgtcctcgaaagcgcccgcgccgcgcgagtgaaggatccggtcgagcgagcccgaaccggccgtaccgaggcgcttctcctcctggagatacgtcgccggacaggccgaggcagaagaggtcgacatccaggccggcggcgcgctcacgtacgggccctgggtcagcactgccatggcgaggcgggcggcgagaaagagaaggacgagcgagtgaaaggttagcgtcttcggctctgcgctcggagagatcgggcgccgccccagcgtctcgagctagaggcccgctcttggctcctcggccgcccttcgggcctgtgctcgagcaccacagccatcgtccgtgctcccagagcgaaggaggggtcgtcccccgggccctgtcgtttgtgccccttcgcttgccaccctccccgggggagaagggccagcaagcagaaggacgggcccagaacaaaacgggccgcccgccggacaaagcaagggccgatgccggctgctgtagacccttaatttcctccgggcgagcgatgagagagagagagagagagggagatgagcaggacgaacctgtcgaagggtagaggctgtcgtcttgccgacggtggttgtactgctggtgctgctggtgttggtgctggacgtcggagagcatccgtggcggcggcggcggaaaggctgcttggtgagactcgtcggctcgggccggcggtgcggccgcctgctgctgctgtcgctgggctgaggagcgacggctggtgaagctagcagcggcctccgccggccgatagtcgaggcggccaggtaccggaagaggtgctgccgacatgcgcaggcgattgtgctcccaagactcgtggcagttgagcgttgacagggagcaagggcaggcagcaagggaggtcgggtcgcgtcctgtcggtcggtcggtcgcgatccgagggcgcggcttcggggcgaggcgcgcccacgctcgggggcgtttggcggcggcgcgcgcgcgggttgaaagaaaaacgagcgcggagagtctaggccttgcctccccttgcctccgccgccctgtcgcaccgcagcacaagtctcgacttcgcgtgcccgcctcccctgtcccctcggccgaacgagtgcgggctacaagcgggccccgtccctatcgacaggcggttactgcaggcgacgctggctggctgggaggaggagacggtcgtcgtcttttgggctggcaggcaccagccttcctcgactcaccactgacaagaaactccgtccccgctgacaaacaggctgctcgacgctcgctgacagaaggaaggctcgctggcggagatgcgtacgactgccgccggcctaaatcaaccgcctccggccggtcagcccgtcgtcgcgcagcgaaccccgcagctcctcctcctcctcctcacccctccacccggccccgtcttttgcgacaacttccgacgccgacgcttgtcaggccagccagaggccgacgacgcatcatcctccctttgctgagggaagcaagcaggtcaacctccaccctgccctcgataatcgtccccgacggacgatcgttcaaaagctcgccgtcagactcgtcctcttcctctcaacaaccacctcgccaccttctcactacccttcttactactttacacctctcaatcatgtctgctaaggggtgcgtcgcttccctccctgcttcctccccgaggccgtctggtgctgaccgcaaggcgtccttccgcccgcccgcctccagatacgccacgcactcgaccgactcgctcgacttcaagctcgtcgacttcccgctcaagagcgagggtcccaaggtgcgttcccagttggccaacccctggcttgagctttctgtctggcacgtgactgacgacgccgacctcatcctctttcaggacgtcaccatcgccattgagtgctgcggagtctgcggctcggacgtccacagtgcgtaccttgcttgatctcgttgaccactatcaggctgctacatggccgctgacctgctcgttcccttccctgtcccttcgcgcagccatcactggcggctggggtcccgtcacctgtgcgtcgaaacttcctcttttctcaagaccattgaccgtcaattggtcgaatctctcccccgccttcgtgctgacctgaccgtcgtcgacctctttcttcgctagacccctgcgtcgtcggccacgagatcattggcaaggtcacccagctcggcgaggacgcctcgcccgagttcaagattggcgaccgcgtcggcgtcggcgcgcaggtcggcagctgcggcgagtgtgagccctgcaaggctcacaatgagcagtactgcacagacctcatctttacgtaccagggcaagtacgagacgggcgaggctacccagggcggctacgcgacggccatccgttgcagcgaacgcttcgtcttcaagatccccgacgccctcgcctcggtccacgccgcgccgctcatgtgcgccggtctgaccgtctactcgccactcaagcgcaacggctgcggacccggcaagaaggtcggcatcgtcggtatcggtggtctcggccacattgcgctcatgtttgcgaaggcgtgcgtcccatccaagccctcctcgttctcgcggcgcggttgctgacctcgcgcacctttctctcgatcagcatgggagccgaggtctacgctctgacccactcggagaagaagaaggacgacatcaaggcaatgggcgcgacacacacgatcctgacgtctgagaaggactttgagaagaagcacttccgcgagctcgacctcatcctttcgactgtcgacaaggttgagggcctcccgctcgacaagctctcgcagctcctcaaggtcggaggcgcgatccgcaccgtcggcctgcccgacgctaacgctcctgtcggtccccgtcctgctgccctctctcaaaagtgagcgcgcgctgacttcttcccgccgacagcttaacatcacgtcgatgagcttcctcaccaaccagtgcacctttggttcttcgctcctcggctccaagaaggaggccaacgagatgctcgccctcgccgccgagcacggcatcaagccctgggtccaggagctcccgatgtcgcgtgagttgtcgccggcttcgcgcagtcgtagcatacagcgcgctgacccttgttccctcgatctcttgcagaggccaagaaggccgtcgacgccgtcctcgacggctcggtccgctaccgctacgttctccacaacgacatcgagtgacttgcctcgcacctttagtcgctcggccaccccctttagagcgcgctcgggcgcccttagattgtagagctctcccttcccaccaccccacgatgtatcgctagacagcaagcaagcaactcatgacactttttcgtcgaaccccatctccatcttgagcaagaaggagaagcggagggcgtgtgccgtcggccggaagagtattcatgagtggcctaacgtttcgactggcagccgcgagaccctccctccgacgtcgaccctctcaccttgcaactcggatcaggactcgtcagtctcttccgaccgctctttgccgacggaggtgctgcaaacaaggtcggctgacttcggctgcttgctcggttctcctcgatgcagcatccaagccccgccgctcttcataccacccacccagcccgcaccttaatgtccgccgacgccgccccgcccttcccgtcgcgagccgagcgcaaggcctgctggaacgcccgggacgcctactatgcgtgcctcgagtcaaagggcgtcgccgagcctgggactgagccggctggagcgtgcgacgcgcagatgaaggagtacggagggtcatgcgcgaggtcttgggtgcgtctgctgggcttcagctcatctcgctagagggatcggcgagcgttagcggttcacgaacctcctgatgctcgcttcgagctgagctgacgattaagtgctgctgccccacttcctaggtcgagtacttcaataagcggcgcgtgctcgaggctgagctccgggcccggctcgcggccgagcagacgagggggactgacgtctctggcatccggtgcagcctgccttttgcccctcgtggcccgtttttcgacagaaagcttgctgatgctgcctgatatccttcttcctcgcttacaggcttccgacaagcttcaaaaagtagagcgctccccggcccccatctttcgaggacccccgccaccacatccattcggggcggcggcgtgctcgtcccgatcttcactgcctcatcccgtctcgcatataagttatcgtgtcgaaagatctgcttcctccggcaacccgtcgacgtattcagcagctgccctccgcgagccgagcgtctgttgcgcgctgggtagctgttcgagcacaggacacggcacgacgcagtcctcgacaacacttgtcgatgacaggcttcgaaacgacgatttagatgcaactcacctctcatcctggcgaccactgttgccgagcagaccacgcacgtcccgctgtgtcgttcgagcaagcgcttgatggtttggcgtacgagccggccgacacggctcctcttgtttctcgtggagcctcaagtgacgaatgggagcgggcattagtacaagcgaggacgacgcagagcggaggctaaaagcaaaggcgggtaggccgcggacggtgaaaggagtatccgacaaggacggaaaagggtgaagcaaaggagataaagtgcaggaaggagcgagggcaaaatcgaaagaggaggaggggatgcgggcgccggagggcgagagtccgtgagagtgaaagagcgggtcatcggccgccgagcgggacgacagggacgacacagggcgcgctagaccttgatgaccttgctgccagccgaagcaaccgctggcggtcgccgtccgccactcccactcccactctggtcgacagggacgctcaggccgagcgtgtccggcgccgccgtcgactttgaacccgacgtcttgcgctcgccgctcgacttgcccccgcccccgctgccggacgagaaggtcgtcgggagggccatcggcctgaccgcgtaggtcgtcggcgagtagaggttgagcgcgcgcttcttggcccagatggagcagaagaggatgcgcttctgccggcgcgagacgaagaagtagttgaccgacctggcagacgagagggcgggaagcactcgaattaagataagtccccttgaggcggaggctaaagcggagtgagagaaggggagactcaccagaggcagccccggcgggtcgtgtcgttgagcgcgggcggcctgctccggttgccgacgagcgggagcgagttgaggctcggcgggtcaaactcgccctcgtcgtcgtcaaagccaccgtcaaagcccgccccttcgttgctccgccgcccacgccgcgagccctcgctccgccgccgcccacccgagtgatagccgtcgtcctcaaagccttcaagaaagtcgtcgccgtcgacgccgccgggaccatcgagctcgtcgtcgtcgtcgtcgtcgtcgtcctcggacgactcggcgtgcgggtccgagtcgatgtcgggcgtgtaggagaagacgtcgcactcctgaagcgtcccctggaggacagagtcgagcacgcgcgagaggtgcgggtgcgtaaaggctgggacagacgggctcgagagcgtcgaggagaaggaggaggcggcaaagggcgaggaggagagcggggcgatcgatggcgggtacgagccgtacgaccgcctgagagggaagcagtatgtggtggtcagcgccgacggccgacggcgcacactagccgcgcatacatccgaggcaggacgacttacggtccctcggccgagagctcgaggacggttgcgctcagctggcggagaacgtcctggacgctgttctcgcgcacaaagtggtcgggtcggacctgtgtgaagtcgtggtcggggaaggccacgttgaggagggcgatcagccagaaccacgtttgtctgggcgcaggtgcggaaggggccggacgcgtcagcgtcgtcgcgagctcgagggaagctgagatgcgagccgcggccagatgccgctctagcctcggtttcgactgcctgagcacatggccaagcttcgattaagagaggcaacgtacctgctatccttttggtcgagccggccgaagcagctgtcgagcgtcgcatcgcggttctcggggctgaaggccatgtggttgtcgaggtcctgctgctcgagcgagtgggcctcctcgagcgacttgaagagcttgcgctcgcgcgagaccgacttgcacgagtagacctctagcagagcggcggatggatgggcaggcgggcgaggggggaggagagtcagctgggtgggtaggtagagccgataagccccggatcggtcgcccgtgcgtgagaccgtcctcgttcgacggctctcagcgctaccatccagggccaacggccgtcacaggacgcgtcgtagctcctggaccctctcatgcgcccctggagcagaccagcagaggtggatgggccgaggaagggcgcgagggaagcaaggatggtggcgatgcgcgcgagacactcttgaccgcaagcgggagcgcgaaacgcaccgaagcgggtccggaccttgagctcggcgctcgagtaggcgagcagctcggagagctccgagagctcggggaaatcgtcaaggtacttcatgatgtagggaggatggtgaggacggtgaggaggaggtcaagagcaagggccgttgctcggcgacgccgctaagtctcgcgcgcgcggggagcgtcggaggcagactgcgcgcggcagattggagaagagccaagccgacgggcagctgatgcgtgctggcttcagccgagcgctgtgatcgactgggagcgagagggacaagcgagcagatagccctgctcgtgccgtctttgctcgagcctcgtaggcggcgaggaagggcagcgacgagcgtcgagctcgaagtcctctcggccggagtctgcttgagctgccgacgagagccaacagggttagcgagcggccagacgcagcgctgttgagcgactgccattgggccaggaagacgacaaggactgccaggcagctgtcttgcgagctggtcgggctggagggaaaggtgcgagaggcgggcagacgaggcgccgacgtgaaaaaggtgaagtgaagtgcggggcgcgctggctcctccgctggtcgtgtgaaagggcgggcggccgacgacccgccatgcttggaaggcgcagtccgtccttgcatcatgccacgcccagatctgcggtgggtgatggatctctgctgtcgagtgaaggcgtcgcttgaacgattgcgtcgagcgaatatcgacggtcgagcaagctgacgggcgacgctcagtcaaagaggcggtctcctgtcgacggtctctgcgcccaagcttctcctctttcgcaacgacacggcaaccgacgcgaaggaaggtcattaatcgaagcttcacgcgagccggctcgaagaaccaagctctaaaagccgcgaacgagagcagggcaagaatacagtcggggttcggaaggagaacaaaaagggttcggaccgtcgggtcaagggagaagatgccttgccgccagaacgacggcgaggcgggaccgagaccgatccggatggagggtggctacgacaaaggcatcgcttagtactgcaggagaggacaggcaaaagtggtgaggaaggtcagttccgagcctccgtcgccgcggccgacatcagatgagagacgcaccttgaggatgatgtacagggcatggatgatgccgggaatgtaactgcacgaagggaagccgaggtgtcagtcgaccggacgagaggaggctttggggagcgacaggagagagagtggaccgacccgaggacggtcaggaggatgttgatgaagaagtcagcaccgcagccgcgctcgaggaagacgccgagcggggggaggaagatggcaaggatgatcttgcagatctgtaagtgcgaccaagaagagaaggggggggagtaggtcagtcaatgtgggttgacggctgcggcgttgagcagggaggtgacaggggtggccggtcggcgctcggcgaccaccccggacccaacaacggagggacgtacgtcggcagcggtgaaagccattgtgaaggtggtcttttggagggttaagggtgaaagtcggtgggctggatggaagggtcggagggaggagagatgccagccggtggaagaggggcgtgcgaaggtcgggcggcgagcgagggtgacaggcgcgaaggcggtggaaggggcggaagacgtcagcttcgtcctggcgcacggcgaaggagagagcgcgaggcggctagtgctcagcccttacgctcgtgaggcgggacgtacgtttctgagtgttgggagagagagagggatggtggtcaggagcgaggacggacgggcgaagatccgactcttgtgggctggccgacgcacgcacgccgcagccgcttcgttcgccgcttggctggccgccgcgcccacgccgcgccgcttctttgatgacgcgttgacgacagctctgcgggcgactcggccggtcgggccaaggtcaaccttcctgcactcgacaggactcaggactcagggaaacggcctgggtggcagtgggcgaagccaggaaaatgcgccttcttcgaacatccttgcttagggtcgtgcaggcaggacggccgctctggagagcaggcagccagcgcgcgcgcagtcgctgcggcctgtcgacgtcgactcgcacgcacgcgccagcgaccgaccgtccgaccgacctacgccgcaagcctgaccccggataggccatacggcctctggactcttctcaggcaccgcagctctatcgtgcgaaaaggcgggtcatgacgttctaaagtcgcagtcggacgagcgagacgagcgtcgcgccaggtgcggcagcagattgtcgctactggaaaggggggaaagggccgtctaaggagcaaatgctaggctgcagcctgtcggatggcagggtggagagcctggtggaaggtgagaggctatgaggagagcgtattcagagtgagcggctcaaaggggatgataggaagcgtccagcccgcgccgcagtgtcgttcgcctgggccgagcaagaagaagtcgtctcttccgaggacgaaatccaggctggctgaattggttgaaggagggggagggattgagaggcctgcaaggtcccctcgtgtcattccgcctcggtcgccgcgtcgtcctgcagaccctgcgggcgagcgagtcagggccactgacagcgcactcaacctgtcggtctgagtcgttcgttcgtcttgtctcgtctcgcctcgtggtagatgaacactagtccagccagaatgcgggcaggccgccgcatcccaagatgcaagcaggacgaaaggtcggctcgcaggccaacgtgcgccggtgtgacgccctgtcaacctggcgctggcgctggccgatctgtgagaggcgaccgagcgaaggatttgtcgcttgctcgcaagccgatcagcagtgtcagttgaatgagagagatgtaggattgtcgtcagtcggttgccagcggccgccggcgcgtcgtcgaccttgtggctttggactggctttgtcgcgcggccgggttcgaagaggcaagccggccgtcggctagcaatcatcatctcgtcctgctctcaacaccgctctctcttcctggtcctcccagatcccaggttcctgttcgccgtacgccgtacagccactgggccaagagcgtctcgcacgaccgaccgaccgaggacgagatctcgctctctctgcctgcgccgcgcccaccgctcgcctcgcgccctccctcgcgggccatgtccgacccctcgccggacgagcagcgccaggcccctccggtcatccaacagcagcagcagctgaagccggtcctcgcgcgcgctccatccgaggggagcctccttcagcgcccgaggagcctctcggtcgccagcagtagcgccgaaggttccggcagcagcgccggcctgctcgcgcacggctcgccccagaagttgcggccggtcccgagctcgggcatcagccctcggaggaagcctgtgccgacggcgctcgaccttggtccctcgacgacgacgtcggctgacgtctgggcggacgccgacgaccggtttgcagacgctgctggcgacgaggtccgtccctactctctccttcctcttgattgcccggttccggttgagccggcgagcccaagagcaggcagtcgctgggtgttgccatctctcggttctgacgtctcttctcgcgtgctcccgtgtccagccgctctcgccgactgccagcgtcgtccggccctcgccgtcgatgccctactcggtcgtcccactcagctcgtacgcctcgggctcgggccagcgagctcgaccgattcctcgctcgaacagccactcgttcgcgccagcgacggccccggatacgtacgagcctagcgtccctcgtcagcggtcgctcggcacggttgatggggacgaccactcgtgcgttgccggctcgtcgccgctcgactcaaactgttgatatcgttccgtcgttgacgcgtcctggcctttgccccttcgacctctcagttcctcaacctttggctcatcagcagcgacaccatcgtcgacctcgcgcaacaccccgtcgagtgctttccccatgacgcccgacccgccgagcccgtccaatatcgaccgccgagggctcgtcggcgtcggcgagctggcgaccccgcgctggtcgcatagcaccggacccggctcaaactggagccagccgcacgcttggcaagacagcggggcgggctcgtcgagctgggatcctcgaggcccggcagcgacgggcgagcggaaccggagttggggcgagctcgcgtcagaagcgcttgccaacgcgcagtcgagctcggccgggctcgttcggaccggcaagtccgagtcgcacctgcttggccaacacactcgcgatcttgcggccggtccggaccgggggtttgggctcgacgagccccaggagatcatcgacgttccggcactgtcaccttcctctcgcatgccaccagcactcctctcgtcctacgatctcaagcgggaccttgcgtcggacgaggcgcagccgatacccgtctcgccgctgacgacgaccgacaccgcgtcctccttctttgcgccggcacccgagtcggccaagacgtacgctgctggcctgctcgcagccgacgacgctgccgctgcgggcgtttccagctcccctccgcgtgccgcagctgccggcgcatcgggctcgcccagaactcaccgtcgtcggccgtccgaccagttcaagctgtctttcggcgcgacagacgccgagtcgaaggcgccattgcgcgagaagagcgccgctggcgggctcgacctcacgccttgggagcgccaggcgcctccgattgaggccgtcgcctcgccccaatcagccgagtttgcagcggccaagccttcaccgacggcggcgaccaacagtggagccgaagggagcggccgcaagagccgcgagcgccgacactcaaactcgaagccgacgacgccgtcctcgcccgggcacgacattgtccgccagttttcggcctcgcacgacttcagccatctaccgccgtcgccgtcgtcgtcctcgatccagcgctttatccgccagagctccgtctccaacctctcggcagcgtcggcagccgcggcgggcgcagtcccggctgtcccatcgctcccgttcctcccgcaagcctccctgtcggtcgcaaactccagtgcgccttatccggtgacgccgccaaccgaggaggtccgccggcaaggcgcgccctcgggctcgtcgccggcggcttaccccttcccgagcaagcggagctcgctcaagaacctcgaccccgagacggtcgaagccctccgtcggctcgacgggctcggccggtcaggctcgagcgtcacaaagggctcgacccggtcgggccggacgcgggcctcgagtggtgcggccgacgacaccatcagcgtcaagagtcggtccggcacgccctcggtcgcggccacgcccgaacggcaggccaacagcaactggagccggagctcgatgccggccatgccggtcggtccaaacgcaccgctcgatggtgacaaggccgacgccagtctttcaccccggtcggcctcgtttgccgtcgcccgatcgagtcagggcggctcgtcaagcgtctcgtcgaaacgcggctcggcctcgtcgacgacaacatcgccttactcgactgcgccatcgaccaacacagccggcacacgcgcctcggccgtcggcgcgcccaagatggtccggaagaacagcgcgtcgagcgacacctctggcgcgaacagcgatggcgactcagtccaccgcgacagggcggcgtctgcggcaggccgggacgaactcgaggacattcctcccgtcccaccgctgccaaaggcgtacgacttgagcgtgcggtcgtcggtcaacgcgttttcgtcggcttcgttcggctcgcaggccgcccagctctcgccggcgacaatgactgctgcgcccagtacgacggtcctcgtcaccaccgccccatcatcgccagcggccctggtcgacgagttggctgcggatgtcccagcgcccaagccgaacgtgcagacgcctgagaaggaggaggtgctcgctcaccttctacggcgaggctcgtcggtcgacgacgctgcaatcgatgcgagctcggtcgcaagcccccggcggtcggcgaccaagaagtggagcttctcgaacgcgttcaataagctgtcgtcggccaagcactcgaccgcctcgaccgacgatgtttcctcccagccccggtcgccgacgatgccgaccacggccgtcccgaacccaccgcttgggcgtgccagcccgcagattccctggaccattggaggcgagcatgaaggcgagccacagaccgacgaaagccatcgggcgagcaccgacagctacgtcatgccgtcgcccccgcttcagacggctcgccggctcccgagcaacagctcgctcgcgctcccttcgtctggcgactcttcggcggcccaaaccccggccagctccagcaagcgtctgacgccgagctcgatccccttcttccggcggtcgtcctcgcagtccatgaacaagcttgcgtctggcaccccttcgtcgggccctcggccgccggtgccctcgaccccgggcgattcggcagcttcgacaccacgcaagctctcctcggcctcgatgcaggagccagcttccgccccggcccaccgcaagtcgatgctcggcacgatgggcttctcgggcatgctcaagagcagctcgtcgcgccggagccttgccgctgccgccgccgccgccgccgacccctcgaacgagtttggagggagcgccactggcaagcgccctcgcgaatcatcgtcggacgctggcgaaaagggctcgccgggcaccggtcgactaaccagcagtctcggactccttggccgccgccgaggcaaggtacgtctctgacagttcacccctcctcctgccacactcgctcaccggaatacacgatcctctacccacagaccgtctcgtcgcaggacaaggacaaggcgagggacgcgctcgagcagttgcaaccggcccagacgatggagccgcctcgccagccaatcccccgagtggccagcctcagcaggccgtctccgtcccccgcgagcgggacgggcatccctcagtcggcgtcgtcgagctccctttcaggcacgagctccgtccggcgccagacggccgccgctcaacccaagtcgaacgcgctcctgcggacaagtcgagcccatctgccgaccatctcgggctcgccctcgtcgagcaacctcagcggccaggttcagcctcttgccggtgcagcggtcggcacgatgagcacgagctcgtcctatagccggatgaccgacgcgacgccgaccaagattccgcgaatcgcgagccgccagagccggcagctcggcaccccgacattgacccagccaagcctctcgcgccgcggaagtgagacggcgacgattgattcgtttgcaacgggcctcagccgggctgagtcgaacctctctgactttggcgcgctggacttcgagtccaaggcgacgacgcctgcgcagcggttccggacgacgacggccgcgtcgacaaaggctgatcacagcgaggccgccgccacccggcgctacagcagcatcacctcgtcaacctcgaccagctcgttcatcacgaggccaccccggcaactgcctgtcccgccgacgtcgtcctcgggcgccatcacggtggctaagcgcctgccttcgagcagttcgcttgccgagccccgtcgactgccctcgagtagctcggtcaactcgggcctcgcttctgttgccaccccgggcacctcgagcctcgcgacgccgcgcacgttcacctctaagtacgcggcggttgccccagggatcgcccgcatgacgccgtcgtcctcgactaactcgctcgctgcgacgagctcaggcatctcgcgctccgcctcggcctcgcccgttgtcatcgaggacgacgagtcgatcggtgacgaagagatgcggcagtttatgaagcgccagcgggccaaaaaggcagcttccggtgcgacgagcgccgagatcgaggccatgatgaactacccggacccgatcgctcccggcacggccaagacgccccttggtaggtcgctggcgccccctttcggacttgaccttgcgccatccactgatacctttcgccgccaccagccatgattaaggctcacttcaccgacctatccgactatgagcggcgcgagatcaccgagtacaccgaggtcttttgcgtcggcgtcgggagcaagaagaagatggccaagctcgacgacacggcgctcaaccacggctacgacgacgaccggggcgactacctcgtcgtcaacggcgaccacctcgcctatcggtacgaaattatgggcatcctcggcaagggctcgtttggccaggtcctccaatgccgcgaccacaagacgggcgaggccgtcgccgtcaagatcatccgcaacaaaaagcgcttccaccatcaggcgctcgtcgaggtcaagatcctcgacaacctgcggaaatgggtcggtccccggcttgcctccatcctccgccgagcgtcgcgaagctgacgtaattctttgccccgccaggacccggaccagcggcactgtgtcatcgtcatgaccgagcacttctacttccgcaaccacctctgcatcgcgaccgagctcctgagcatcaatctctacgagctcatcaaggccaacagctttgccggctttacgacgaccctcatccggcgctttaccgtccagatgctccagtcgctcatcctcctccgccagcaccgcgtcgtccactgcgacctcaagccagaggtcggtcgccgtcctttcaggccctctgtcgtcgacccgatgtgctgactggcgctctgtgcagaacatcctccttgctcatcctgccaagagcgggattaaggtcatcgactttggcagcagctgccttgagcacgagaagggtgagtttgtctggccttctcaccctgtccgccaggtagctgacggccctctgcggccctgctttagtctacacctacatccagagccgcttctaccgctcgcccgaggtcatcctcggctgcaactactcgcaggctatcgacatgtggtcgctcggctgcattctcgccgagctctacacgggcttcccgatcttccccggcgagaacgaacaggagcagctgtcgtgcatcatggaggtcctcggcctccccgacaagtacatcgtcgacaagagctcgcgcaagaacatcttctttggtgcgccgacccatttgatgggagccggctgttcgcttggctgattgacgtccgtaccttacccgttcgcccagacacccaaggcaccgcccgaccggtcgtcaactcgaagggcaagcgccgccggccaggcacaaagacgctcagccaggtcctcaagacggacgacgagctttttgtcgactttatcgcaaagtgcctgacgtgggaccccgaccggcggctcaagccgatgccggccctcaggcacccgtggctcgtccgccagcgcgttcagctttatccgcagctgccggcgacggcgtcgacgccggcgtcgaggctttcgctcgtctcgaccggaacagcgccgctgacgacgacgaccgtcactagccggatcgcttcctcgctgaccggaactggccgggccaagattgcagccgagacgccgaagaaggtgcgttcctcccgtctgctacgcgctggaagagctcggcctgaactctcgttaccctgtgcttctccctcaaaggcgcccgtcatcggcccaccgaccccgctatcagcgcgcgtccgcgcaagtcagatcgtcggcccttcgtccatctcgagctcagccgccaacggccccggtggcggtggccacacgtcgcacgcttcaatctcgtcgaccggctcgttccgccagcatcgggcgtcgcagcaagcgctgacgacgagcgcgtcagctcggcacttgagcgtccatggcgtgcgtcctgcttcagatattcgaagccttgaaaggatcaactgacctgtctcccaatcacatctgcaggccttgacgtcgtcggccaagatttgaggatgcatcctctgcttctgtcgactcaccatctcagtcccagcccatgacgccttcttctgtcgcccatcctcagtccaaccttctaatctcttcccaatgcgcattacgtcacactcccgcatccccttcacgcttttccgactgcctcaacgactcaacccacccctctctctctctctgaacactcctctccctgttttgattccactacccacccacccgtcagtgcctgtggacctcaaaagccagcccctcgggtgtgctcacgctttctcctgcttcggctttcttctcaccctcatccctctgataccatctgccccttctctcgtgctcgtcgtcgcttggttcgctcgactcgccggtttgtctcttgctgcgcgctcgctttcacagcctcggcccgcgcgcgcccgtttctcctcctggccttgccggcctcccttagcgtccgcccgacgacgaccctctcctccttcctctgcctcgccctccttccgtccaaccaacagcaatgtccagagatcgcctcgctgctatgagggtgcgtgctctccttgtccgcttttgcggcagccggctttgcgcgcgaggcgaagccgccgccagggccgaacacgcgccacgcccgctcgccgctggacctctcgttctcaagcccgtgtctcgacgtcaaaagtcggcccagatggactgaccctcttacatctcctgtctgcgttccctcccttctgctctaatgcgtaacccgctgctctcgttgccattggtcctcctgctctggctggccttcctccgaccgacgatgcggccgcttgttgacggccgcctgcgtagggcccgacccaggaaacatccggccagcaagggtctgtcctccatcgctatggctcagtctatggccttgcgcaagtcgctgacggcgagctcttcccttgctggtctttcccagctacgcccagccggcttacaaccagccggcctacggtggtcagcccgcctacggtcagcagcagcagccccagcaggcagcctacggtcagcagcctcagcaggcctacggccagcagcagccggcctacggcggcgctggcgcttatggccagcagccccaggctggcgcgtacgagatgcagcagacgggcggccaggtcgacttctggcaggaggtgcgtttcggaagagagaggggggcgagcagcccggccgccgccgccatcgctgctcctcctggccagcgagggctcgcatgctgacacctcgcctccttggatcgattgtaaccagattggcgacatccggacgatgctcggcaacctccgccagagcatcacgcagattaaggtgcggcccagcccatcctgcccgctccgaaatcaagcgagggctgacgcgttctgccttccctgtgcgcactttcactctcgccagacactccactcgcagtcgctcaactcgccctcgggcccgccgcccgagctctcgcagacggtcgaagagacacgccagctctcgaccgagctcaagcagcggattaagggcgcgaatgcgctgacgtcgggcgaccggggcaagaaggcccaggtcaagggcgtcaaggagcagtttatgggcctccttcaggagtatcagagtgtcgagaagatgcaccggagcaaggtcaagcagcgcgccgagcgccagtttaagatcggtcagttcccccccccccctctttcggcgctgcaacgctggcggagagcagcctcgctgatcccacctgcgcttctcccggacaacagtcaagccggacgcgacacccgaggagatcgagactgtcctcgagtccaacaacccgcagatcttccagcaggcggtgcgttcctgcagcagcagctcgcgagccaccttaccctcatgactcacgcccgccgctgcctctgaactccagctgctgtcctcgaaccggcacggccaggccaactctgcctaccgcgaggtccaggcccggcacgaggacatccagcggatcgagcagacgctgacggagctcgcccagctcttcaacgacatggccatgatgatcgagcagcaggacgagacgattgtcgaggctgagacgcaggcggcggccgtccacaaggacatggaggacgggtgcgttcagccgtggcatcgcgaccatctctgctgccagcctctcgtacgcgagcaagctgaccccttccacgacacgccctcccccagctccaagcagctcgatacggccatcgtctcggcccgcaaggcccggcgcaagaagtggatctgcttctggatcgtcgtcattatcctcatcatcgtcgccgccgtcgttgccggtgtcgtcgtctcgcagaagtcggttcccccatctcttccctctgattcacccgaatcagtcgctgacgttcctctctctctgtaccccgcatcgccgagcagcaagaaatagtgatgcatcacgcctcgctgcgctgcccgttgacctctttcgccttccacttgggcgcctacctaatcgcccggttgccaatccgcccggcctggcatctgtcgtcccttctaccaaggaacatttgcccccccttactcataccccctttatcacgcttctgagccttcttttctgcgcttgccacctggaacgtcctcactctccttgctctctcctcttctttctctcttgcgctggcctttgccatgcccatctcccatgcgtttgcagacacccccgctggcatgcgaattcaccgccgatcgcttcgtcgccgctcgcgctcacgctcgacccgacgcaggtcgtccgggtggtatcgactctcgccatagcccgtcgccgacgtaccgtacgccccgccgtcggccgtccagccgccgctccggacgctccccgagggcgtcgcgctccggacgctgacggccggcgtgctcggctcggagctcgcggggccggatcgtcgacggtgctcggcgatcagcgcgagggcccgctcgcgctctgaggactcgcggtgtagacgcctgtcagttggcgtcgcatcggccggcgcccggattgctggagatggtgcagaggcgcgggaggatatgcgcgtgaagagcgactcgatgtgcgtcagcgggtcgcgcctcgtcttgctctctgcgtctttgcgtctgcaggcggccgaaatgagatgcatgagctggcaagccatgtcggccggagtcgccagcatcgactcacagacgctgctcgcgcttgcggtcgagtgtcttgtccctcccctctcggtcctcaatcttgcgcagctgcggatcggtgtaccacggctggagctcgcgcgccggccgcgagaggtacatcgtgtacgggtcctctcgctcgagctcttcgggtgttttcttgaccttcttgtcgggcgcgttctgcggctgaggacggcaggtgagaagtcagcgtgaaggacggccgacgaagcgcagtcgacgcaccggtcgcatctcctcggacgcccagaagttcagatgaccttgaggggaaagacgtcagcgatcatcaaagcgtcaagatgtgaagcccacgctcaccatctttgccgtagaagctgagcgagtcgtcgcccggcggcggtttgatcgacggagcggctgctgcagacttgctcgagccgttcttgccgtcgccccccttcaagaggagccggtcgagcgcgcgcatgtcgtcgcccttggacgctcgagccttgcccttgcggtctacagcgcgccgttcgccatcgggctgggcagcatagaaagggtcttccggcacggacgggtatgagctcgaggaggaggcaacggctggagggggagcgtcttgaccggctggcgcgtcgcggcctcggaggagggccaagcgagcttcggcatcctagaagatggcacatagacgcaagccaacgtcagtaaactacccgggcctatgatgagatgctccgcttgctcgggcacgagagactaacggcttgcagcgagcgttgctcctcggccgtctcgcgcgcgagctcggccgcctcgtcccgccggacgcgctccttgttcttctctgagtaggggtggtacgacttgtgctggaggatgttgagtttgggcctgaacaggttaatcagtcgtggaagtcagaggcgtcagaaagaggacggtcttacatggttcgtggcaggtcggtcgttgtcggcgggtcgaacgagcatcgacgccgcggacgcccgcagcaagccgccggctactcaatgtatcggcagcctttcgcacaacatcgggttcaagacgagagaaagtctgggcaacatctcatactaacgatacagttgatgtctcccggcagagacttctccgcaggcgacgacatttcgccgcctggctttagtcgcccccaccgcctcctccatcaccgccccctccgcagtcaccgccgaagtcgcctccgtagccaccgccaaagccgcctcccatcatcgatccgaggagcatgccgccgccgagaccacccatgaggggcatgcccatgcccatgccgcgccggccgtagccgccgtagccgagcggcatgccgacgccgttgtagcccgggtaaccaccgtagcggctgtagcctccaccgaggtagggtccgcggctgtaggccatcgacggcgcgctgtagcgctggacaaagcgaggatcgttcatctgctggcggaggagggcgcgccgggccgcgtaggccttctcgagccgctcctgctcggcctggaggagaagcgacggacgatggcatgtcagtacctcgctgtacggatccagcaaaacacgaagacgtacccgctcagcggcagccttctcgcgccgccgggcagcgcgctcttccttcgtttttccggtaatgcgctgcttgagcttgtcaccgaggctcttctcctcatgctgctgctgctgctgctgctgctgctgctgctgaggcgcgccaccgggagcataggcgcgagggtcccgggccgagtgacggtcgccgcttgtcgcggcagccgaagaggacgagatgtgactgtcaggctgcgtgtcgggaattctgatggtggtcgtccagtggtcaacagtcagcttcgaccttaccatggagggagaatcgcaaaagtactcgcgactgcaaaaactcggcgttttcaaagggatgctcccatatggagcgaggaggatcggccttggtgtcgacgtaaaaatggtgctcagagctgagaggcggggacgccgggaggccatgtttcagccctcagcgagtgagcaagaagcggaatggaggggagacggacgcgagatcatactgccggatccagccgtcgggaagcgggagctcctcgtcctgggcagactgcgatgcggagagacaccagtcagccgagaggtcgcaacatgccgtcggagggagggaaagaggcggacgaacgcggacgcgggtcaggtcgacgcctggcgcccggagcgactggcggtactcctcgtcggccgaggagccctcctcggtgtcggaagccgaggagtagggcggaggtagattggatggctgttgggtagaaggaggcatggtcatgcggttgtgtggtggtggatggtgggctgaagtcggccggaacgccatctcggttggagggcgagcgtcattgaccggtctcgatcgcaaacggtcgaggcgcagcagcaagctcaaggcgaccgaacggggtgctagaagcaaatatatcagggtggtcgtcatgcaatgaggtctattgtgatacagctgcgattctgtgcgattggaggagagaaaaggcgagagtctaagcgagctcaaagtagcgctcgacctgcagcagaaagggagcgtcagcacaaggcccgagcccgatggaatcgattctccgacggcgcacctcgaagctcgtgacggccgtctgccagagttcccactcgtgctcgcgcgtgcccttgaagtgctcgacaaagccatcgccaagcacctcgcgggcgatgctcccctcggcgccgaaacgctcggtcgccgcccggaggtcggtcgcgagcttcgggaggtccttgggcgagacgtccgggtggccgacggggccatagggcagcgtgagcttctgctcgatgccccgttgaccgagcgcaaagacggccgacagggcataataagggttgatatcggctccagggacgcgaatctcaactgcagaaaggcgaccagattagcttgaaggtcaaggtcaagaagaattcagccaggccgactcgagcactcacagcgcgtgccctcgctcggagcaccgggtgggccaaggatccgcacgctcgccgcgcgcgagtcgtaaccccagctggcgagatttggtgcccagaacgcttcgccgcccgtcagccgtttgtatgagttgatgttggggcaaaggagcggcatgacgtctggcaggccgcggacgacgccggcgaggaactgctcgccaacctcggacaaaaaggcgacgtccttgtaggcggcgcccggccggccatcaggctcgtcgcccgtataggcaaaggcattcttgccctcgggcgtttggagcgagacgtggatgtggccactgcagcccggaagcgaggcgtacggcttggccataaacgtcggcatgacgccgtgctcgataccggccgtcttggcgagcagcttgaacaggacggcattgtcggccatgcggagcgccgtcgtgtagccaagggcggtctgcaagaattcgtgcttcgtcagtataacaaaaggaggtgccgagggaactgtcaacgccgctggcgcacctcaaagacacccggtcccgtctcggtgtggtggccctcgacctcgatgccgaactgctcagccttgtcgtgcaggtcgtggaagtaggcgttgttgagcagcggcctgagcatcgaatagccgtgcactggcagggagtatatactctcgtcagccttcgttcggttggtcgcctctaatgaggcgtagaggacgcactgccgggagtgagagccgtcaagttgacgcccttcttctgcgcgagagtatcaggcgtctccttgaactgtaagttccgacatgacagcagagggtcagcgcccaacacgacgacgcggtgagagagggtcgctcgaccggccgcacctggaagtactcgaactcgacgccggcgaggcctttaaagccctcaacaccgtctccaatccggtccagcacgcgcctcagcatccctcgcggacacggcggaatcgcaactttggtgtccgggtcgaggtaggtgatgaggaagagggggcagtcgttctcgtacggcaggcgccggaacgacgcgaggtcgacctcagcgtgaaggtcatggtagccgttctccttgttgctgatgaggagctcgcgcgggtagaccgtgtcgtgcaggtcccagccaaagatgactgagcactgaggtggcgagagataggacggtcagtgccttcgcgggctgaaggcggaccagtaggagagatgacgcacaaagccgaagccgcccttggccgcgctcaggaacttcttcttggacatgtacttgccccggaggacgccatcgactagccgatgacagaaacacagcaggggagtcagcctacgtctcttagagcgagggatgggtctgctggactgagtagcagggagggtcggaggcaaggagctcgcgcgcgtgcgcgtgtgcgggacggaccatcgacgccagcgaccttgaccttgatgtcgtttatgaggagcgtctcgagctcggcgaggttcttgggagcgttcggagtcgccatcctgagtactgtggatggggaaagggagagaggggagtgatggttgggcggctgataggtgctggcgagccgtgacgaggctgaggcaggtgtaggcgatcgactctgtgcgcctaatgggggcaagcagcgagccgccctcaagagtctgtctctctcgcaggcactcgtgttgggcgcacagaggagcagcctctaatatagtagcacgtcgcgcctgatgatggcctcatttcttgcccttcgccctcgtctgccgcttcgacgacgcaccgcccgccggctcgtcctccgacccctcgtacgtgccctttgccttggcccgctttgcccgccagtgcttgaggccctgctcaaaaagctccatcgtcgtcccgcgagagtcgacgaggatcatcgtcacgcctgccgaagtgagaaggatggtattcagagcgctgtgagagacgcgaggcgaggcggtcggatgaacgaaacgaaccgagctgctcaacctcaaagttgcgcgatctgtcgtaaggatggaccaaggctggtagagggtcagcgaacggcggctttgcaagggccgacggtcagaactgaactcgtcgtcgaagaaaagctgagcgagcgcggaacaaccgtgtttagcaagacgccctcatcctcgaccctgcagtgatcgacgacggaccatctcgtcgtaggggatgcccgtcttcttgtggagcgcctgaaagtgcttgagcttgctgccggggtagatctccttcctgctcgtcgagaaaggtgcgtcaatgatccgggtgcgagatatcctaacaacaagagcagcactggcgaacggcggatgcgagttgcgcccgcggctgtgaagaggagaaggaggagggtacgtgccctttgaagaaggacgatgcaggcctgggcgcctcgtctggctggtcgtgagggggcggcatgagcaaaaggctgagaacctcgcgggcgctggggcaaaaaaaggtagcgcgagaggtcatcgagctgggcttttaagacgaggggcgttttaataggatggcgaaatgggacgtactaatcaactgcgctcgttctcgagcaagcagcgatgtacgacccctctgcctcgatccggtgcagaatctcgggcacgtctttgtagaagcggatcggctcgccccgccgcggtcggacgcagttgagctcgttcccttggcgcttgaaagggccggagacgtgtgtgtcgatccactggggtagcggggaatggcgggaggaattcagcgccggcggaagagtagacgaagagtgaccggtcaaaaagggggacgaactaggtctgtaaagagaggacaggcgcgcgttggtcaacttttcaagacaaggcagtatgctagatgataatctccttaccccaacagctgtagagagaagacgggcgcgcattggtcaacttctcaagacaaggcagtacgcttgataagaatctaggaacgtgtagtccaaatcaaacgccaacagccgcgggaagcgctcgggcaaggtcatggttgctgtcgaggatgagctggagggagagggaggcgagaagaagcgagcgctggagggagagggaggcgagaaggagcgagctgcgccgaccgacggcgtgcacgcggcggcgcaacaggcagagccgaaggtcagcttgctcgtccacatgaaggatggcccggcattgacggacctatgcgtccagggtctgcaggacagggatcgggaggtcggcgtcctggtcgaaggtcaggtagaaaacgcctgcggtcggagccggcaaaggccagaggcgatgacgctcgcgcgggcggacgaaagcgaggcgaggccggcgaggcgggctgagcctccgaccctgtccgcccaaccaaccatcacctcttcccttcttcccaaagcacgatgaccttctcgccctcgcacacgcccaactaccccgccgccacgctcgtcgctcagcagccgagctcgcgccagtcgatgagtgcgtccgtcccgtctcggggctgtcacccaccccttcaacccgccttccgcagctcgccggctggcgatctttcttccagccgtcttccaacggctgacctttcgtcttgggcgttttgacgcagcgctcgagcgtgatggcgagactggctccgagcaccagaaccagcaggagcagcagaaggagcagacagtcgaagggagcgccatgcgcctccgcggtggatgcccgggcgtgcgtccctccctctcccctccgctcacaacctgccgtcaaacgctgacttccctccatgggatctccgtacgtggtggaattagcacttctgcggtctcccaatcctccgtacgtcccgtccgttgttcttgacgcaagggcgccggcttcgctcgactgcgcctccacctgcccgtccagtctgcctggcgtcctccggctgaccctcctcccttggtctgacctcgcccgcttctgctgcgccgcctgaagcttgccgctgtgacatctgcatcgtgccgtacgtctctcctgtttggttgagctgtctattgcgctcgtgcggctgacttaactctcgcgccgacgacagttgctgctgctgagcgagtttaagcctcttctggctgagatcttttctcaagacatccacccgcttgtcacggcaagacgcagtgctccagtgtcgccttgcgcccctctcttctcatctgcggccctcatcgcctcattatggtgttcggccgggcgtcaatgccgacgccaacctcactgtagcccgactctcttccccttctcttcgctgttactttggccgtcctcgcgcaaggcacatgaccctgtccgctgaatacacgcccgcttttttgcccttcgagcgaggcgagtgagcatcggcttcagagttttacggcgacatcgaacatcgagcggcagggctcatcctgtgagcccgacagcaaactggactcgttgttgcaacagtcgcaggtgtcttgagacgaggaggtgtgatttcgatgacttgcctgggaaggtgaggcgacagcggtgggtttgctgcgcgactgactgctcggcaggggcggcgcgttttgcgggcgggaggaggagagagaccggtcgtcacctctgcccagcctccatacagcttgaccttcaccttcaccctcagccagcagacaaagacagctagccaagccagccagtcagccagcagccagctctcaatcctcgagcctcaccgcgtcagtcgacttaatttactccgagcgaggccctccggtcggcgcctcctcacgcttggcgggcagaggagcgacggccgccgacgccagcccgcccatccgcccggcctctgcctgagtccgatcgatagacagagggagagagagactgaaggcccatcctcctctctctgcaaccagtcctcatgttcgccagctcgttaccgctcgttgccgcccttggcgcgctcgccgtcgccccgctcggcgccttcgcccaggacctctcgtgcggtcctcctccctgcttcctccaccgagtctccctcgctcgagcgccatggctgactatctatcctcctctctctctcgccttctttgctcctccctcctgcgtttcttgaacgccttctactctgtcgatccaccgcccgtcctcgctgtcacgcctctccgctgcggaaacgcccctctctctcgcgcgcgcgtcttgtctcgcctcgctcaacgaccccacccgaccacctttttggactcgccgcaggtcgaccaacaacatcacctcgctctacggaacgtggtcgtctggtagcggaaacgtcattactggcattgtgcgtcctcttgtcggacggtcggtcggctctgagaggaagggacgaaggggcagctcagcagagcacggcccactgggtggacgagatcgctgaccctgacccctctttacgcatccgccttcctacctctctctcgcgcagggcttcgccgacccgctcaactactcgttcacctacccgctcacgaccggcatcgcctactcgttgtgcgtctgccctccaacttaagctcaacgagctccactcgacgaccgagctgacgcctcgcttccctgcactccctcccagcaccgacgacggcttcttcgaagaggcccagtaccgcttcaactcgaacaactcgaagccaaactgcatccaggccgttgtctttttccagcacggcaagtacgaaatgaatgcaaacggctcgctcgtccttacgccgtttgcggccgacggccggatccaggtccaggatccgtgtgcggcagagaccaacttgatcacgctttacgagcagacggtgcgcctccttccctgtcggcttcgctttggcctttgcgtcgcatctcgaccgctttggtcgtctgccatcagagtgcgaccgagcccaccatccgaggctaacatcacactctcttcctcttgccgccagacgctctactcggactggggcatccaggtcgacaccgttaagcaaaactatgcactccagctcgcaaagttcgacggcgcgccgatgccgcctctctacttgatccagcggccgccgtcgatgctgccaacggtcgagctcaccggttacggcatgggccttaacgtgcgtctcccctctctttctctcagttctgacactcgctgcgcgtcacttagtgcaagactgaccttcaacatctcctcctcaacgcgcaggtgtcggtcacaaagcgcggcctcgacgagcctgtcgcaaagcggagcgcaggcgctcgcgcgacggccgccggctggagctgggcacccgtcagcgtcgtcctcggcgcgctcggctttgtcgctgctgtcttttagaggagcgcggtcttcggagcctctcattcctgcatcgttctcttttcctacttctcgcggcaatccggcctcagccagacgccggagagctagacgactgagccggattggttttcaccctcgcccctgcgcccaaacgtatggcatatacccccttctccttcccggttggttggcctcgcacctaccatcttcctcttccccccggagatcaggggccttactctggaggtacgtctgccctgccggctgatcgtcagccccacccccaccaccgccgccagttgttcagctgaccgtcgtcgacaaggccagcgccgcgctcgcctcctcaacccgggccaatcagcagctgtcggtgagggacaaggcgctatcgcgcgggaaggcgaaggaagtggccggcggcggtggtgggggtggggctgacgatcagccggcagggcagacgtacctccagagtaaggcccctgatctcccttgcgtttgcgccgaccttgtccccacttctcactgaccgaccccttctctcgccgccctcagacccctactacctaatgaacgcgaccctgacgagagccgacgaccagtccgacctccacctgctcaaggacggcaggacgcgctacacgctcggctcgaccgtctcgtccctcttccagctgaaggacgaggacaagtcggacgctggcttctttgtctttccggatttgagcgtcagggtcgagggagactatcggctcaagctcgacctctacgagatcgtcgcgtgggtctcctgccttcagtcggtctctacactcatctgacgttgacgtcgccctttctcgcccttttgctttgcccggcagcgacgagctccactattgcaagacgatcctctcggacccgtttcaggtctacacggccaagcgcttccccggcaaccagcgtgcgtcctgaccctcatgcatgtccttctgctgcgcacgtcgactgacgcgcgtcacttcgccccgctagaatcgacgaacatgaccaagctcctctcggcgcagggcatcaaggtccggacccaccacgctgccgcgccctcgcgcccgccgtccggccggcggctctcaaacagctcgtcaaagcgcaaggtcgggcatgagccgcccgggtcagcgacgatgatcaagacagaatccagcggcgggtcgagctgcgacatgatgggcgatggaggaggtggtggggggtcgcttgggaggcgcgattcgacgacgtcgagcaagcggccgaggatggccggagggctcgacgctacttccaccggagggcgaccggtatcgaggcctggctcgctccattcggcacacgaatacgacccgcgcggaccagccccgaggcccatctcgtgggggccgccgccgcccgctccgtcctctggcgccgccacgactggctacccatacggccacggcgcttctcaacccgcagcggcgtcggcgggctacggcggctatcacatcggcggcggcgcggcggccggcgacccgacccgggcgtaccatcgtgatccgcgcgagccctggccgcaagagccggcgtcgcaccagacgtcgctcagccgggtgctcgacccgcgcatcggcggcgaggagcagcagcgggcggtcgacctttcgagaccgacgttgccgcctgtgagcgccctccgggggccgagccacggcgagggcggagacggcagccagtaccctcggccgccgtcgtcgagcgggagcatcagcggcggcagcggcgcgttcagcaacgcccggcacctctcgctcggcggcggcgtggcagcgtccgagagctctgcccatcggagctcgatgtcgtccgtcctctcgtcggagcgctactcgatttcgtccaaccgacatccctcgctctcgtccgacccgtcgtcgtacgccccttcgccgtcggtcttcgaccacgacggcgggcggtatcggcctggcataggcgtcaacggcggcggtgggaagacgggcctgccgtctttccaaagcttgcacgacgactcgaagcgcggcgccgccggcggcccgcacgtcccgttcccgaccgaaggtccccacacgacggctttcggcgccggcagcggcggcggtggaggaggaccgcctgtcttgcctgcgctgagcggcgtcggtggcccgcgcttgcccagcctgttggagatgatggcccagccctcggtccaggtcggcggtgccgcgcaccagcgctcgctctcgccccttggctcctcctcggcgtcgaatcgtccggcaggccagcagcagcagcagcagcagcagcagcagcagcagcagcagcagcagcggacgtcgcccgagagggcttcgtcctcgcgcggcggccggatgggcctgagcgacctgctcgccgactgaagtcggccttgcagacgaatgccatcatctctcttacgacccatctcttcaccctcgtccgtcacgtcggcttctctattcttgccttgccttgctttgttttctgtctgccctgtcacgaactccctgcccgaagagatgtctgttaaacacaattgactgccggccagcagagatcatgaccggcgggcgagcgagcgagtgagggcgtctcgagattagcatcacccctccaggcgactctctcgcgctgatcaagcgctcatggtatcaaagcgagcctcaggccatgcccgggtcagacgggagcgtgacgcgccagacgaggatctggttggggacggtcaggcccgagacgtcggcgtacgggccaagcgggtcgacgccgtcctgcgtaatgaagtcgttgtcggcgacgacgaaggcgaagtaatctggagaagcgggggaggtcagcctctggcgctggagagggacgtagacggagctgaggctcaccgttcgggttgctctcgtcgagcgcagggacgagcgcgaccgcctcccacttcgccgagatgagcgtctcgtcaaacgtgcctccgttctggagcccaaaacgcgcgagctcagcctcatcgagcatgtcgatccactcgaccgtctcaatcggggtgatgccgctcgcgagtttcgagccgggcgcaacgggcttgcccgtcgtcgtgtactcggtgtcgacgaggtttgtcgcgcccgttgtgctcgcgaggacgaggtccttatgctttgcttcggcatcagtgtctccgttccccttcccgtccctgctaaggacgacaaacgtgtgctcgttggcgcccgggcccgagctgagccagcggatgtcggacgcagcgagcgctttggccttgccgtttgtgacgggcaggcggaggacgaaggattcggtcaggacgggcgttgtcggctgcgagacgtcccagccgaagagtcgagtaaaggcgccctctgccacagccagcgagcgcaagggaccgtcagcaggagcaagggcgcggatcgcgagcagcgagttcaagcgcaggtgggacaacataagacgcactgtcatcgcgcccgccatcctggacggtcgccgactgaagcaacgcccaaagcatcctcccgtcggcgctcgccgtcaggccctcaaagccctgattgccgctccggccggacgtcggctggctctcgctcgtgaagttcaagccgccgccggcagaggagggcaggacggcgaagggctgggcgagggtcgagagaagcttgcccgcaggagagaagcggtctgcggtcggggcgccaaaaagggggggggggtgttagcagctgcgacgacctctcgcaagatctgtcaaaatgacgcacagatgtaaggcccgtactcgtccgagacccaaaaggagccatcggcgttgacgacgagcccctccgggtcgaccgacaaccggtcgtacatgtttgacgcgaccggcagcggcgggatcgcgcccttcgccgggcggacggcgagcgggttgaggcctgtcgtcgggcttccgttggcgtcggtgtagaggagtgtgcgctggtacgagagccggagcgaggactggacggcgtcggcgtaggtctgcggactcggggaggagtagggcgtgaactggatgtcgaggagctgctggcgggcttggtagtcgaccgtcgtctcggtgttgtgcccgcgctgcagggacaaagagcgagaccggtcagcccgacgtcttgtgcagatcaggaagcaggagctgaagaacacacgtccggctgggcgatgagcgtccccgtgtagagattcgacttgcccttccgccgccagctgccagggacgaactgcgctgccgagccgagtccgccgagtgtcaaccccgtcgagtcaagcgtcgaaggcgggacagccccgaacccgacgagccccttgttgatgtacgtctggccattgaatgtcgttggcattcctgaggggatcgagccgtcctttgggcgaccggcgggacggcccgaggcggaggtcgagaggaggatcggggctagcagggcgagcgtcgtgcggaatgcgatgaggatcatggcgcgaaaggatgtggatgcaggggtggggcgagcgtcgttcgtcgatcccgacagccggctttatggcgcccggcatcgtcggcgcccgtcaacaaggctgcaagcacgaggagcgaccgtgggtcaggaaacaggcacgttgccggtcacgatggctgaaggccgccccatcgcgtcctgtactgctgccgccagtcacttttatcagtcctctcgatcagctgctggcgacctcaggtcatggtcggacgggcgagtaagaactcgagatggtggtcgagtcccgagatcaggatggaagggcggccctacaaacgaacgcctgtgaagaggtgaccgcccggatgcattgcggctcgatgcgtttcgacgggcacgagggcgatccactgggtccaacgccggcctgccctcccctgacgacctcctccatccagccagtcagccagcccgcccgcgatgcctcccaagagcgaccacaacgccgccggctcggagacgtccgagttcccgatcctctgcgagacgtgcctcggcccgaaccgtctgtcccgcccgcctactgcttctctcccgacgcgtgccgtgtgttgcgcgtcggacgagctcgctcgctcgctcgtgtgctgacccgacctgacggcctcacctttgtcctgctccagcgtacgttcggatgtcgaagcagccgctcggcaaggcctgcaagatctgcacccgaccttgtccgtcccgctccctccccccgctcgccaacgtccgcgtcgccgtcagctgacccgcccgcccgtaccatcctcgcccgacagtcaccgtcttccgctggaacccgggccagggccgtttcaaaaagacggaaatctgcaacacgtgtgccaagattcgcaacgtctgcgcgacgtgcatcctcgacctgtacgtcctgctcgcgttcttgctgggcgccatgcgcaacgggttagttggctagccggatgaaggttgctgactgagcgcaatgcgccgccatcccctcgtctcgctctcgcagtgagtttggcctgccgtcgcagatccgggatatcgctctcgggcggaagaatgaggccccgacgtccgacatcaacaagcgtgcgcccccccccccccttcagccctgctcgtgcgcgcgaccggccagccggctcgagcgtcactcgtgctgactcgccctcatcccatctcggtgccttaccttcctgctttttgaactccgcgacgcagagtactacgcacaaaatatggagcgcgagctcgctgactcgacgacgaacggcgccggctcgtcgagctcgatccgctcgagctcgaccgggaaggagatgctcaaggcgatggcaaagacggatccgagctacagccggaatcgggcgcatgtgtgctcgttctatgccaaaggggagtgtgcgagggggggggaatgcccgtataggttcgtctgcactgcagccggtcgtcctcttgcagagccagtacaggcgagctgacgcgaggctcgcctctttggcaggcacgagaagccggcgtctaccgcgccggcggtctctgcgagcaagagcatcgccgaccgctaccacggcctgaacgacccagtcgcgaagcagctcctgagggcaaacgcggcacaggcgggcttgacaccgccggcggacgagtcgatcgtgcgtcgcctagcctcctgggggctctgctctgcgcgccgtctgtgcgctgggaggggctcgttgctgacccgctagctctggtgatcttgtagacgacgttgctcctgctggccctcccgccgacgagcgaggaggctgtccgcgcagcgatcttcgccaagctgccctcgctcggcccgaccgagctcaagtcggtcatctacgtctccgcctcgagtatgtctttcccccctttctcgctcgctggccgtgctgaccccgtccgctttgccgacggctcggcttggcagactgcgccttcctcaactttacgacgcgctcccaggccgagcgcgcggcgggcagcctcggcgcggcgggtggggttgagctcgctggcaaacaggcgaagctcgtctggggccgggcgcggaaaccggccgccggtgctgctcctgctgcctcgacgacgacgacagccgcttgaacgggacggccggtcggtttgtctgttcgcccgtcggcgcgttgcttggtcctcgcccgcctggcggtcggcgggtcggtcagccgccggaagtgagcgtgagcggacgacgctttcagcccaactactagtacccagcccgagacggcgaggggcggcccaacatccggcccctgtgcgtcgtcggtccgcgcatgggcacatcgccctctctcgcgctcgctctcctttgtaccatcattcctgcgaggcgcccgtgcccggctttgcatcctatgagacctctcattggcttgcttttgcgacgacgccctcgctcgacggaccggatcctcgtttaacgggcgcgtgccgggtcctgccgccggtggcggcggctttatcccgccggccggtcgacgacggaagcaagggcgctgttcgggctggccgtcgggcttgcgctccgggcgcaatgcagctgggcttgcttggttcgaccagtcgtttgcgttggtggctgagtcgcgcgaggggtcgtcgtttgagccgcccgaggaaacgtcagaagctgcagacagcctctcttcagaccagcaccaggagcagcagcagaagcagccagctagcaaaccaagccaaggcaaggcagactgctcgagcacagcaaagtcaacaagcctcaccctcaccgggttcagcagcagcagcgtcgagccccctcgtcttgcctgaggttcgtcccctcctgcccgttcgagcgcgacgctccgactcttcccctgcaacgcccggcccgggcgaccctcatccgctgcacgaccgcccgaccaagcccgtcctttgaaacctacaggttgctcacaccctcctcgtcgtccagcagcagcagcaagtcgttcgacgtcgaccccgctgcgcctccagctttgcagcgctctcagccggccagccgttcagccgcccgcccctccgtcgcagccgaagctcgctgggccttaggctttcagaggcccttccccgctctcgcccctcctcctccctcacgaggcccccgagaagcacgccaacggtcgggcccttgctctctcttaacgcgacgacctctctgttccgtgctcccgaatctctaggtcactcgcccagcgagctcgtcgttgccgcccagtcgtccgcgcgagccatgccgcgccatacgacgctcgaccgcaagtacgaagccaccggtgcggcccacgctcccatcctcttgcgcccctctcgtatgaagaccgctgacccagtcttttctctcggcgcgctgccaggcggcttcatctaccctggcggaggccgggctcagacgcacatgccgacgcgcgagcaggtcgtcggccgcgagcgctcgccctcgcctaagaagacaaaggacggatcgaagagtgcgtccctccctgctgctctctctctcacacacacactctcttgccttcttgacgcaccgctgacctcgagcgcgatggttgcctgcaggtggcggcttcttcagcagcctgttcggcggcggcggctcgagcaagaagccgtcgatcaggtcgggcgcgaccctctcgccgccgtcctcgcgcaggccgtcgctcgcctcgcaccagtcggagccgcagttccccatcgcgaccgtccccgtcagaccggcatcgctccgcgcaccagcatccattgtttcgcccatgatggcagcctcgctcaccctccctcccgtcgtcgacccaacgcccgtcaagccgccggcgctcgtccagaagaagtcgatccaaccactgtcggacgagcagatgcgggacctgacgaaccggctcgcgcacgcgccgaacgagctctcggagcaagacacgtttgtcctcgtcgaccactacgaggaggccggcctgtgcttcccgcagaatgcagagtggatctcaaacgtctcgttgctggtcgagacgttttacgaggctccgccacacctcaaggtgtcgccttcgacgcgtaagcggacggccgagctcctgtacgagacggtctacggccgcgtcaaggaggacgccgagcacgtccggctgcttgttggcgaggtcgtcctgccgctgctcgagcggacgctcggcaaggaggtcgaggcggacattgacgacaaggcgctcgccgtcctgatcgacgtcgccgtcggcgagacgctccggctcgaggcggccgcggctaagggtcgacgccggccggcggcgccagaggagacgaccgtccccgtcaagcactctgggaccgaccctccctcgccgtcgtcctcggacgtgttgtttgggacggacgacgaggacggcggcgggcgctttggctcggtcgaggctgacctaccggcaagcttcttcccggccgtcaagacgctgctcatcaagacggccacgtggtcggcagcctcgagcaaccggcagtgcgtccgccgcaccgcagcgttagcctctgttcgcttttgctgaccagtctatcctggccgccctcgcaggagcatgctcatcggctcgggctcactcgcgctgcccatctcgcccgtcatgcccgccagctcggccctgaacgacgtcccggcctttgcgctctctgcctcggtcgacggcgtcctctcgcacagcatcctcaaccccgtctcggccgctctctcgcccgcgcagagcattctccagtcgatgtcgccgaccgaggagctcacgcgcggaaggagcgttcggcactcgccctcgcagcacctcatgtcgcccgccatctcgcagtcgcccgcgactggcccgccgacggtcgagtctctccgctcggccaaggcctgtcaggcgctcatctcaatcttcacgcggctcgtcctcggaccagagtcgccctgcgtcggagactcggtccggacgctctcgtcaacccgggctgtcgagatcttcaacgatctgctcgacctggttcgccggccgggctcgacgccgccgacgagggacccttcgccctctcgctcggcggcggcggcggtggccgacgtgaacgcgtcgtcgaccgctatcaagccgcatgcttctagcctcgtcgcccggctcgcgatcctccagtggatgctccatctccgggccgatacgcgccaccgcgtctcggtcatcaaccgcgtcgacgacacgtacctcgcctcgctcctgaaccgcgcaagggcgccggacgtgcccgaccgcgactttggcgcggcggccgacggcgagccggtccgtcgccggccgagccgcttcgtctcgtcagctcaggctgtagcggcaacggcgccggcctccgagcagtctgagtcgcgaggccgcgagggaggccgtgggccgagcggccgcgagcggagcaccgtccgcaacacgagtcggagtcgctcgcgcatgcgcgactatcgtggctcgcgcgaggcgcccgagcacccgctctggtttgccggccaggacccggcgtttgagctgcccgtcgacgcctcgccgagcgagtcgctcaatacatttgacccccaaagggtgacgcacaaggatccggcggtgctcccgcacgggctctggctgccggtctcggcctacatccgcgtcgtcgtcgacctcttgacggacgagaccgagtgggagctcgtctcgtacttgctctgtcacctgccgcagcagctcgccaaccagcactttttctgcggcccgcgctcccgcgaccagctctcgatcctcgtcgaccggatgtgcacgtggctctcgccgggtggcaggctgcacgtcagccgccagctgccggccaaggtcaaggtgaccgaactgaacgcggtcgcctaccagacgctcgacgtccttgtcagctaccaccgtcagctctcggccggccaacactcgaatctgatcaaagcgttccaccacggcgtcggcgcgaccgagtcggtcggcaaggtttgcatccaggccctgacaatgacgattgccgagctcggccaggccatcaagaaggacctgatcagcatcatgaacaagctctcgaccatctcgtcgtcaatctcgctctcgattcacatcctcgagttcatctttgccgtctcgcaggcagacgagctccacaccaactttactcagggcgactacctcgacacatttgccgtcgcgctcaacatcatctcgacccaccacgagtcggtcaatgtcgcgccgggcgccgaggcctcgctggcggagaagtcgtcgtttgtcctctcgcagcacatgctccagtttgcctactttaccatctacccctggttcctctcggcgagcctccacctccggccgcagctgatcccgtggatcgtcaagcgcctaaccgaggctaaggcgagcccgaccgacgccgacgaccgggccgaagtctgcatcgactttcttcgccgcaatgccttttcaaacgccgagccgatggagagcctcgccctgcccggtggcgaggccgacgacgatgtcgatgttgccttttggatccgcgactcggccatcgtcgtcgccaagctcaaccggctcaccggcaaggccaagattggcgtcagccgggcgtcgggcgcggcggcccagatcgtcgacctcgcgggcgttgaggccaacgcccccgatgtcacagctcaggccgagcagtcggttgagatcgagacggtacgttcccccgcagcggagctcgccccttgcgcttgactggccctctgacgcctgcttccccccttcctttgcagaccccctccgagggcgatacgcgacggacctcgcttgacggcccagcgccggcaccactcgagtggacgcgcgagcggcttggcgaccccgagctaattgctcgccagttcccggtctacgaggcggccgaccagccggcgccggtggcgctgcccgtgaccgacaagacgggcctgacgacggcaaaaaacctcaacaagaataacccggtcgtcgacgtccacaagatcggcgtcctgtacgtcggcccgggccagacggaaccgctagagatctttggcaaccagcgcgggtccgaaaactacgagcgtctcatcgccggcctcgggaccgaggtcgccgtcgaggacggcgttgccaaggtcccgaccggcctcaacccgaccgagcacgggacaatgacgtatgcgtggacgagcccgctcgtcgtcgtcgccttccacatcgcaacgctcatgccccagctcgttcaccagccggccttcaacaacaagacgtcgccgatcggaaacgactattgtcgcgtcatcttcaacgattccggcggcgagtatgcgtttgagacgatcccgaccgacttccagtactgcaacattgtcatctcgccccacacgaccggcacctcgcgcacgcacgacaatccggacgagcacaactttttcaaggtgacggtccagcgggccgacggcatcccggactttgggccggttggccaattcaagattctctcggcccagtcgctcccgaaatttgtccgccagctcgccctgatggccaacattctctgcaagatttttagcgaggtcatccgcaacgacgaaaataatacgagctggcgccggcgcctctttctcattaagcgcatccaggccaacgcagagaagtgcgccttacttagctctaagctccgctgcttcctagcccgaccgacgctgatattgcttcttccactacagagccactgccgccgccgcctctacctcaggaccgatgtcgcccctctcaccgacctcgccggcgcgcggcctgccgacctcgacttaattccctcccgcctcgcacctattcccgctccaagacaccctcgtctcgcacctctccctcgtactcaggtgttctcgcttcttatcgcacgccattccccgtctccacttatgccgcccatgcaactttcttcttctcgctgcaccgagcgcgatcgtcactcattgtcattgcttgtcgtcaaggtcgtttcgcgccatccttcgggaagggcggccacttgccgctcgctcgttctagcagttgcgctcctcgggcgggcgacagcgcacgccgagctggaggatgggaggagggtcagcccaaggctcgtgcagcatggcaggccgctgggatccgcaccgcgtcaaaaatctcttgctcggtccgagaggcgagcgctgttgcggaagggtgtcagttttcgtcagggcgagaggacgggccgcgcggtcgtagacgggcggactcacgctcgaggtcctcagcgccgcgctgcaggcccttactcgcgcgctcaaagagcccacgctggttcaatcgcagacccttagtgccggcgagcttccgaagcgagcggttgaagtgttcattgcctgtcgtcagggacgactcgagtcagccagagctccacaagtgggcaggaagagcgactcgcctgtgaaatagatcagggctccgccccactggttgaacgggatcgtcaggatgtcgatccggcgttgcttgtgcgccggcgtcaggcggcagcagccgtgatacttcatctcgagcgccgacccttccattgagatcgacagctgtgtcgtgcgtcgacagtggtcagcagattgcgagatgagaggatcaggcgagcaaccaggacgtacgtcgtgcgtgaggaagcccgtcgaccgcaggacgagcatgagcttgtcgaggagtccggcgtgcgtctttccgtcggccgtgtcgcgggtgattagaaggtcgacatctccacattcggccgccccgcgccggaacgaccccatgatctcgatgctgatggcgtcgtcgcccggcgcgacctcgcgcaaggcagccttgacgacctcgccgatggccgcaacctcgttgcgcgggattcgctcaaggaggtccttgtagatcgccagcccgattcgcgacgaggtcgagaggtggaaccgctcaggctcgctgcgaagctgctcgatgctcctcgcgccggcttcgtagagctggttggcgcgaacgaggccgacgccgtagatgttggccatcgccttgacggcgaggttccgcgggttctgctcctctaggacgagtcgggctgtgccgcccgtcttgatgatctcctcgatctgttgcgtcaggaagggcgggtcagcgacagagcgcaatgaagtctgctctgatggacgtgccttgtccgcctgacgctcgccaacacctttgatccgaagggcttctgcccgagaatcgatctgcttcgggtagcatcggacggcctgtgcgacgcgtcgatacgagctgctgtggaagccattgtcgcctgcttgggcctcatagatcgaagcgagacgctggaactgaggtcgggtttgaaattcgatccggtcagcccttttgaccacaaaagattgcggcagagactcacttcctcgatgatgcgggcgttgaccccaaccggcgcgtctgtcttctcgagcggcgcgtttcgcatgcatgcccaggtccctccttgccgctggagttcctgttcaaaggagtggatagagagagcgtcagcctgtagccggcgccgatgcaaacttatgggaaggctgacggcccgtcgctcggctcgaagctgcttcagcagcgcgcgttcagcggccggatcagcaactccgacgatgctcgcctcgtcgtcgctggacagtgtggcgtcgacgatgccggcaggatcagtctcgcggatgaaccgctccaaggcgtcaccctgagttgcggagccgcccgtcgtggcgatgccttcggtgcccctggtggccgaggcgacgccgccggtcgagcccgataagttgactgcggacgtagcgggcgtgtcggcctccttggctgcggttgaagacgtcgtcggccctctgctgggcgaaggggagaggtcagctgcccgtttgacgatgatgaggtccgctagatgatgcaaaacgtacggaaggccggccgtcgacgcttgtaccgctgtcgtagtcgacgtggagagacgcatcgtacgcgctctgacaccgtcatagacgcgcttgtggagaacaaagacgaggtaagggtcctcatcggtgcgcgacatgtgctggaaggtgggcgtctttgcgttagggtccaagcatgcatttcgatgccgcgcacgacttacctcgaagcaggcgttgatccagctttccttgacgaaagcaatatcctttcgaggtccttgcttgagcgcggcgtcgtccttggcgccaaagcggacaagtatgtccttgggctcgcgtggggcgcacaagatgacgtgtgtgatgcgaggcgagtcgtgtgcgtcgacgacctcggcgcccagcgcgctgatctgcggaagtcgggaaagaaaaaagctcagctttgaaaggccaagcgggatctcttgagaatgaaccaaccttgtcgagccaggcgcgctgaaagtggttaacgacagtcgtcccgctccagacgaggaagacgccgacgcccctgagcacgccgcggagcctcagccgagtcatttcctctgccgtcgcctcttgcgagccatcgagcacgaccggactcgaaaagatccgctccgaccggtcaaagtcggcgacgagggcggcgttgagttcggccgcgtactcggtaatgcgccgcatgggcggggccttagccggcagtgccttcttgcgcgactttttgcctggtggcgaggtcgccgtcgtcgaaggtagccctttttctgccacggcggccgcagtcgacgtcgacccgttcgaggtccaggctttttgctggaaagcgagcagcttggctttggtccggctcatgggctttgctgcaagtgggacagtcgttgccttgcctttcccggtgcgcgtagttgccttggacgcaggagctggcgcctgggtcgggctgaactcgagaatcgagtcgctcggtgacgtgacgttggtcaggccttcgaactgggcgtaggtcgatggtccagcgccaggggtcgtcggcgacgaggcaaacgaagtcaggcgggccggcgtcggagcggccgaagtctcggcgtcgagcgacgccacgcgcttcttggtccacgggtcgtgagagttgatgagacgcgagagggtgtggtctggcaaggttcgtgggaggaggccggccggatgagcgcccgagctgtgcaagtgagacggaagctcaatggagggtcgaccgtcggcctcggggacgatcgtcgtgccggacccctgcgcgacggcatcccggaaaagcgagtagcccgtgatgctgcgctcgccgagctgcacgagttgattcgaccgtcgccgaacggcaatgacaggggttggcgggctcgatgagggcgcggtcatgctcgtcgcgagtgggtgtgtcggccgacgaggatctcctgccggcgtggtagcctctcctgacacggcgagcgatgctggactcctctggccaaagtcgcctgtcgggtcaaagctatgttgattcatcgtgttgttggcccacgagaggctggggctgctgcgggccgcgaagacaggagccggtgcggatgatgagccgactgcagggccgagcgtcagaaagccagctggtcagcaggctactcgagctcgggctcgacgccgtgctgcactgacggtccatcggctcttcgacgtattgcgtctcatcagcggacgagacgtcccgagccggctgcatgagggcgacctcgaccgaggcggctcgtgcggacgatggtcgagggccgcccggcagctcccgacgactcgtaccggcagccgaagtctcgtcatcatgcctcgcagcgcgacgagctgcacgctcggccttctgccgctgacgaaagtgctcgaggtcgcgaacgaggtcggcgtcgttctcggcgaggtcggggtcgtcgagcaaggccaggtcgtcggcgaggtactcgctcaggcccatgctgcgtggactggctcaagcgggcccgtacggggaggtttgaccgtagtagagagaagcagcgttgatggctcagaggacagatgaggagagtggtccgtgggaagagcgggtcggaaagggagagacaagctgcgccgctgccgtcgtgagcagcacgagccggcgtgtgaggagaggctcgacaaccctccaattgtctgaattttgcaacccagctcgattcactgaagcacacacagggcaggcagtagctgcgtcgcgggtctcgaccaacaagaccaggtcgccgagccttcccttggagctgctgacgagccgcgcagcaagcccgccgagctcgacaagggacgagccgctcctttcctgacctgatcgaaggacggatgacacgcgcatcacagaggaccggggggaggagcaaacgacgagcccatacaagtggcgtgtagtacaagactgtgtgtgtgtgaaagtagcgggatgggggcatgcggtgcgtgaacgggaggggagggatgtctagagaggggagaccaagagaggaaagcgagcgggaatcgggaggctttagtagaagtcgccctgggccttcatcgcgtcagcgaccttcttgaagccggcaatgttggcgccagcgacgagcgaggggagcgcggcctggtcgccaaactcctcgcccgtcttaaggcagttgaggtaggcctccttcatgatgtcggcgagcttgccgtcgacctcctcgcgcgtccacttgatgcgcgcagagttctgggccatctcaaggcccgagacggcgacgccgccggcgttcgaggccttgcccggcgcgtaccagcagacgtcgcccttggccttggcctcggaccgcgaggcctcaaaggcgtcgatcgcgccctgggtgcagcccatgttggagccctcggcgatgtacttgacgccagccttgatgagcgcggcagcctcctcgggcgagacctcgttctgggtcgcagacgggagcgcgacgtcggccttgtcgacgagtgtccacgggcgcttgccctcgtggtactcgaaccggcccttgatgtcagacgacgagccgaggaagtcgttgagcgtcttgtgcttgagtttgagctcgccaatcgcggcaatgtcgtcaggcgtgacgcccttgtccgaggtggcgacgatcgagcccttcgagtccgagagcgagaggacgacaccgccgagctcaatgaccttgagcgcggcgtactgggcgacgttgcccgagccagagagcaagacgcgcttgcccttccagccggcgcccgagccctcgacgtgctcgatcatgtggctgacgtagtagacgagaccaaagctgcgaggtgagagcgaaggagacggaggtcagctcgggaggccccagccaaacagacgtcagggtggcaggccgcacccagtggcctcggggcggatgagcgatcctccccagtcctggcccttgccggtaaggacgccggtaaactcgttgcggatcttcttgtaggcgccgaacatgaagccgatctcgcggccgccggtgccgatgtcgccggccgggacgtcggtgtcggggccgatgtggcgcgagagctcgcccataaaggcgtagcagaagcgacggatctcggcgtccgaacggcccttggggtcaaagtcgcagcccctgcagatggacgggtcgaggatcagcgagctgacgcgagaaggaggttgtgtaggagaagagcaacgcaccccttgccgccgcccatcatgaggccagtcagggcattcttgaagatctgctcaaagccgaggctggatgaggggcggagcaggtcagcatatgccgagtcgagcaacaacacgatggacgaggcgacgcacaacttgaggatcgacaggttgacagtcgggtgcaggcggaggccgcccttgtacgggccgagggccgagttgaactgagggtgggcgatagcgggggaaggtatttggaattagcggccggcccggggcggtgacggcagacaagcaagaggcgacggacctggacccggaagccgcgctgaacgtggcactctccctggtcgtcctcccagaggacacggaactggatgatgcgctccgggacctggacaatctcgagggccttcttgtactcggggtacttctcaaggaactgttgagcgacggcggaagcgaaaaagaccggcccggtgagagagattgcggtcagcgacggaacggcgacgacctcgagcaggcaggaggagtcacgcacgggtccgagcgtcgaggtgagctcgttgagggcctggcaaggcaaaggcaaagaagggtcaacgcgagggcctttcgggaggcggtgcccaaggcggggagatgggcgacggaggaaggagagacattgacgaggccgctgctgaagctgggcgaccgcaatgggaatgtcgactgacctgctcaaactcaggctcgtggacggtcgacatggtgtgcgagaaggaggtgtgggtagtgtggaggacaaggaagagaagggaaggggcgaggaggtgatggtcggaaggtcgtcggcggtcggccgaaacgccttcaagacggggcgatgccgctcgcaccaattggcaacgacggggcaacgataacgacttgcgtttgcggtttgcgcggggtcggaagagtacgcacggcgtgaggacgacaatgactagcggctagtcaaggcggacgactgcgagctgagcagcagctcgcgctcgccagtatcctcagcaaagcggaatggtagagcctcaaaggcagagaccgcgtcaagaacgcaaagaggcggccctgatgcgacggcgtagcctgtaggcaggatagcgcgcgcatcctgtccgttctgatctcggcagccccttcgtaccgtgccatgtcgtagattctcatacgagacgccgtatggtgtcagcgttcgttcgtgctgaagcctgccggtcgggtccgacgaggcctcgagtaacgcgcttgaagggcgtcgagcgcgtcgctctccatggacatgtagggctcctgtggcttgatgcaggttggagagaatcagatcacggatagagaggccagagtcgaccgccagcccgcttgccgacgctgtctggtgagactccgccggagtacttaagtcgacgtgcgccggctggccggaggtcgagtcgtgcttggatacgctcgccattgcggccttctcatcgccgtgctactggaaagccgagtccttcttggcctgagactccctttaccagggtggatttgcgtgtcaaacgttgaggtcaaggcgcgtcgccgacgcgggcctggcaggctaggctcggattcatcgggtggagcggccgtttgaccatcttggctgctggacgagtgaaaagcttttgatagagactagatgagcgccttgcttcgaaacgaagacaaggacgtagagaggcacacgcacgaggaagcgtaggcagctcgcggcgggcgggcgaacgacagacgacgagcttgagagcccagtgtacggttagcgacgcgccgtcagcttgtagatcttatgctgcgagcaagacagtctcgccctgcgtgtctgagctggtgctgagaggcgagcgggtgatggcgagaggatcatcagcagctgctgctgcgcccgacttccgcctgcttcgacgacacgccggctgccgtcgagccttgagatcttaagagctccagaccttaacctggaccctccctcatttgcctccatcactgtccgtacacctcgctatggatccagccgcggccgccgccaagcgtgtcgctatccgggcggcgctcaccgaccgcgacctgagctgcctgcggtcgctcgccgccgacgagggcggcttcgtcgaccaggagctccggcaggccgtctggtgcggcctacttcttgctccttcttcgcgagggacaggcgctgatcggacgtctctcctgcttgccgtatcgctctgctcaggccgtttctcctcggcctcgacgtcagccgagaggcgagctcagaagacggacgaccgccgccggcgccgacacatgacgtcgcccccacctcctcccctccgtctggcagcagcagcagcaacagcagcggtagcagcagctcgcgtcctccaaccccgcagagtccgacgagctcattcatggaccatccggcctcgtcgctcggggcgtccgtcatctcgcttgcgttcgcctcgccctcggcctcgctgtcgttcctaccgggcgcgccagcccaggctgaagcggcgatgacgactgcggacgatggtcaagcgtcgtcggccccgtcggtcgcgtcagtcgatcctccctcagcgctggtgagcgacgtgagctcgagtgcgagtatagagagcgaccgccggcctgctcgaccgctgcaagcgcagtcgacgattgactggggcctgtttgcctcactcgaggccagcggcctgccggcgcacagcgacgagggccagatcaagctcgacacgaggaggagcttcgtcgtctatccgccaggttggtagaggttccgtctgtttgattcagagacggacgagtgagctgacggccgcacgtatagtctcccagccagagagggaacagctccagctgcagctccacgctatgctgctgaccgtcttccgacggcatccgacgctccgctacttccaggtgcgtctgctgtcgcaccttcagttaccgtcttcggcgaattgacgctgcctgcgcctctccccttcagggctaccacgatatcgcctcagtctttctcctgacatacctccccttgccggtcctcctcagctcgtctgcactctcggggtctcggtcacgatctccgccgccctcagacggcatccgaagagcgcgctcgcgcagctcttcccgctcccagaggagggccgcctccttctcggccgaacgaccgcccgcagcacaccttgaggaggcagctgtccggcgccaggcggcgctcgtcgtcgagtgtgtcgagcggctgagtctacaccgaatacgggacggcatggggctcggtctcgagccggtcatgggtctcttgcggtgcgcccgcggtccgcgctgcgtcaccttcggcttcctctattgacacgctgaaactcgtcgcacagggtcatgagtcgggtgctcaaagccgcagacccggagctcgcaaagacggtctctcggtgcgatgaagccgacggtcgatgcactgctcagtctactgaccggtcgtgtcctacctcctttgccagagcgactcccctaccgttcttcgccctctcttggctcctgacgctattcgcccacgacgtcgactcggagccggtcatccagctcgtgttcgactttctgctcgcgcacaaccccatcatgggcgtctacttgacggtggcggtgcgtgctctcatccggccgtcgtttctgacgacaggagggctgaatggctctcgactccctggccgtagattgtcctctcgaaaaaggcgcttatcgacgaactccggccgagtctgcgtgacgaccccggcctgctccactcgaccctctcggccctacccgtctttctcccgagcgcatccgcgccgcctccctccggccggagacgcacgccgtcccaagaggaccatctgcctgccgctgtgcacaatcagccgccgcttgccctccctgcgctctttgcctcagccgaggctctcttcgcgcgctatcctccagcctcggccgcggtccgcatcagcgagtttatgggcccgcagagcgtcgtgctgacgtacgaggccgagcaggccggccggccgctcacagacgccgaggctgagtgcgtcgtcgactcgctcgagcagatggtcaacgtcgacccgccggtggacgagccgtttccagactcggacgacgaggctggtggagatggaggctgggacgaaaaagagcgtctgcatcggtctggcggcggcactggcaaggagggccggccagccaaagcggcagcgtctgcaacggcgccacgtatcagctggccgacagcagtcgccgtcgccctctttgcgggcgcagtatcgatcgccgtctacaacacagcggccaccggccggggcgctggagggaccacgacaagctgggccgacggcgggcgccggctgggcgagctcgcgggggtcggtggcgtcttggccgacgcgttcctgggtggtggaggcggcggtggcccgagatgagcagccgtcgcgagccgcagatcaatggcacgtgacagccatcgccttctgcaggcggagactgtgcgccactttcctagcgtcctttcctcttcagtcgtcatgcaagatcagggccgagcctcgtctccagcgacgtccctcgcgcgccgggcggcaatgttcttctcacggaggtgagccttaacggcctgggtacgagcacgagaggaatgcacggtcagcggcgcgtgatgggaggaatttgcgcttaagacgcacctgtatcggcacctcctcccggtggaagatgccggcggcaagagcggcctcgacgcccgtctgctcaaagacctcgacaaagtcctcgaccttacccgctcccgagctggcgacgacggggatcgagacggcgtcgcggacgatctggacgaggtcgagatcaaagccccggcccgagccgtcgcggtcgaccgagttgagcaggagctcgcctgcgccgaggcgctcgacgccctttgcgagctggacgacgtccatgtcgacgacggcccggccgccgttgatcgtgcattgataccaccaggcctggctgcgctcctcctcggtcacgttgccccgggcgtttgcgccgatgacaagcgagtcaaagtgcgggccgagctcctcgcgtgtcgctgaggggctaacgtagacccgcttggggtcgaccgagatgacaacggcctggttgccgtaggcccacgagatggtctcgatgcccgtcttgccggtcagagggagctcgccccgggcctcgcgctcgtggatggcagcgacggcgtggacggcgtccgagccgatactgacctgcgaacggaagaggcgtcagggctagacggaccagagtaaacggccgaggagcgcaccttgtctgcaccagcgcggaagtaggccccggcgacctcgagcgccgaccggggcgtgccgtctgggtcgaccgtgtccttgatgccaccgccgacggtcagcggcacaaagatggtctcggccgcagcctcgacaacggcaagcatcggctggtcgagcaacgccgacgaccggaaggaggtgatgttgaggaagcagattctaacaagggaaagacgatgcagtcagcaggggtgtcggcgtctgtcgcagaaaggaggggcacgtactcgtcggcgccggcagcatagtagcgccgagcgagatcgactggcttgccgagattccggacctggccgctcgagccctcttccggcgcagcctcgcggacgtcgtactggtcgcccttggtgacgacgagatcgcccgcgtcgttcgtccggacgtcaaggcaggcaacgacgcgcttcgtgaagccgtcctcagctcgaggcgcgacctcaaccgcggcctcgtcggcgccgtcgtcggcctcaaagtcgccgctgagctcgtcgatcggcgcctttagccagcgctcgagcacacggagcccggccgcgccgctcttctcagggtggaactggcagccgaggatgttgccccggcggaccgacgagacaaagacctcgttgccgtactgcgtcgtcgtgtgggcccagcgcgagagctcggccgtcggcttgctgtacgggacggcgtacgagtggacaaagtagaggtcctcgggcgggccgtcggccgggttgacctggtcctgcttgctcgccgggtgaggagtcgcctcgctccagcccatgtgcgggaccgccttcttcgctcccttgtagacgtcggccgagtcgaatcgggtcacccgggcggggacgatgccgaggccttggatgggctcgccctcctcggacgactcgcataggacctgcatgccgatgcaaatgccaaagtagggccggcccgattggaggtactttcgcagcgggtcgtagaggccactattccggagcgacgagatggcctgcgggaatgcgccgacaccggggaagaggagtttctatggagggagagacaagggtcagacgcgcgaggcggaggtgaggtggcacggttgggcgacgagacgcacgtcggctttgtcaaagtctgacgcgtccttgatccactcaaactcgtagccgagcttgcggaccgagttggcgagcgagcggacgttctgcgagcgaagcagcagatgactcgccgcgtcggtcagctcagagaacgggcgtggcggaggagcccgggcgagctcgcgagcgtgcggcaggactcacgcccgctccgtagtcgagcatgaagagccggggtttgctgtcggtcatgctgggcaggttctgttttgtacgagctatggccaggcagaacgagatggtgggtgtctgggagaaggcaagctgctaggctgactcgagctttggccggccgagaaagcgcctccgacatgtcggcttccagcgagagcgtgcgagagctgcctgggacgatcacatcaactctccctttcatcagcagtagcaggcatggcctcttccgacgacgaagacatcgtcttgtgcgtcgccttaaacctcgggctctttgtgggtccgctcctctcgctgacctgccagcttattgcccgcccgcactacccgcgcgtcatcctccctccctgtcgccttcctctgctgccagcgcccttgccctctcagcccgcgaagccgcccaacggccagccgaggcctcaaggcgggcacccgctcgtgcccctcttctgccgttgcgcgaagcaccgatcgagctcggcgactcgtccgacgacgagatccagatcctcgacagcgccccccctcaatcaccgcgatcgtcggcgtcggccggcgcgcgtcagggaccgccagctcggcgagagaacgcggccgccccgtcttcgacctcgtcagcgcgcgtgacggctgccgttggcggcgttgcgagtagagctgctatcagtgcagccagcagcagcagcaggcccgcggcgcggtcgggctacgtcgaagccaacgccgtgcgccgggacgacgtgcgtgcgcgggaggcggccgagctcgccaggcaccagcaggaggagcaggcgttgcgcgccgatccttatggctatgcggcgggcggcagcggcgtcggcgaaggtcgtatgccgctcggcagccgacccacgcaagatggaggaggaggcttgaggctgggcgggccgccgctgccgccggccgagagcttcgaggagggcggcatggacgccgagatgatgctgtgagtggcgtcgcaactgtccggaatgcttaggcttagtcgctgaccatcagcctgctctggggctcttcagggcgatgcacaagtcacgcgacgaggaggagcgcaagcgcctgctaaagaagaagcagcgcgcactcatggccgagacggacgaggaggaagcaatgcgactgtgaggctccatcatcggcaggtttttctcgaccgctactgactcggtctgcctgctcatgcagagccatcgaggcctcgctgaatgagccgccgccaccgccagcgcaggctctgtcgcgcaagcgcgcccactcgacctcaaccacatcgtccgtcaccgagtcggaggacgactccgacgagcccgatccggagaccgagtttcaaaagcagctggacgatgccgttaaggcctcgaaggccgagcggcgccggctcgtcatcccgcgcgcaacggccgaaacagccggtgcgggcctgggcccgctgttcggcagaccgggtctcttcgacgagggtggcgggctgagcggcacgtcgacacctgttgcggacgaagctatggcggcgcaatcgaagactctggcgggcgcgccgactactatgttagctgcagccggccgcccaaccagccagattctctcggcccaggcggacgccgcctcttcaggatctgtcgctcctcaggcgcccgctgtcctccctaccggggcgacgcgtgcgcagatggaagccgagcgtctactgcgcgttcaggcccggcaggccgctgcctctggctccttgaccgcagacgcaggggcagcgtccacggcgacgagctgttctgtcggcggtcccatcgcacccaaacgggcgcgcatgtcgtcccctgccgccgaaccgagcagcagaccgagccgtcagccggccaactcgacacggccgccgttgaccgagcgcttctggcaagggacgctcggcatgacgcacaatgcctatgcgagccaagccgacgcgaacgagggcatcaagcggtcgttccgtctccccgagctcatcagcgaggtgcgcctgtccagctgttacctccctcctttcacacgctcaccccactccttttgctcgcccagcccgagaacctcgtcttcaccatcttctcgacctactgcatcgagccggccttcctcggccagtgcctccctcatccgaagcgtgcgcccgtgatcctcatttcgcacccgccgacaaaggactgggccggaaagtcggaccatagccggatcctcccgggcgtctgggaccgcttcccgtgggtctcgttcggctcgtgccacatgaaggtcggtctgggtcgagcggctcccgttttcgccagagtcccgtccatctgacagtctcactatccgccctctgatcagtttatgctcgtacgtctctcgcaccaagcctgccaatcctcgcaagtggctgatcgcagacgtccctggacagctctggtacattgacggccgcatgcgagtcgtcatcacgacggccaacttcttcgcgcatgattgggagtcgattgaaaatgtacgcgtccctctcgaatttagaacgccctggctggcgttgacgctgacacaacctccctcatcgcagattgtctgggtgcaggatttcaagcctcgaaccgaagccggccggcagcgttccgactttggcgagcagtgggtcgagattttgaaggtgcgtgaggctctgcgacctgcgagagccagctgctcactcgctgcttcgcttcacctacaggcgctcggcgtctccaagacctttgcccaggtccgcgcctcgctcggggacgacccgcgccagctcggtcgtatgcccttcacctcgctcggcgagattgctgacaagtgggacttttcagccgtcactatccggctggtcgcctcgctcgcgggcaagcgcgagggctgggacgagattgacgagagtgggattgggcggcttggcagggtgctccgcgaggaaggctgggtcgctccgcccggaaaggagcttgcagcgttggaagcacaggtgcgcgttctctgccgctcgacctgacgtcgatgtctgattgctgaccccgagctgttccccacttgtcagggctcaagcatcggcgagtacacgcggccatggaccaatgtcgtctggcgaatggtccgcggcgaagaaccccggcgcttcctgcgggcggcggtcgacgccaaggagcacgctgagagcctcaaggtcgtcttccgtacgtcctttcccgcctcactctcgtgcagagcagcgctcactggccgtccctccaatctttccagccactctgcgcacggtcgacgcgaccgtcctcggccggcctggcggcggcacgctcttctgcacggccaagaagttcgcaatgcggccccagtactttcacgactcagtctcgaagcgtggcgcgcggaccgtcatgcacctgaaggtgaacgctctcttacaacgaggaaggaggcagtgatgccgtcggctaaaacgagctcgttctttgtgaccgcggcctaggtccttaccggcgtcttcgacccgatcccccagaccctcggcggccgctcaagctcgagctcggcagcctccggccgtaaaccgcctctcaagcaacaaaagctcttcgagtcggctagcgactcgtccgagaccgaagacgacgatgacgacgtcgtcgccgtttcgacgtccaaaggcaaaggcaaggcagccgcagcccctcgcgagcccgccggcggcttcatgtacattggcagccacaacttcacgccctcggcctggggtcggattacgatggccaaggcggcgaccaagccgacgctctcgattcaaaactacgaactcggcatcctctttgtgagtatggcgcggatgctggccttcagtggaagagtacctgatggactccacctgccttgaatagcccctacgcgaggcggacgctcagacgcacgcatcctctctcgctccctatcagcggccggtcaggccttaccgcaaggatgatgtcccctggtgcatggatgaacacctgtcgccaagcatctgagcggctcttcctccctccctcccccccttccgcctcgatttgtcctttccacgacttctacgacctccttactctttgacggtcatgaccgttgcgacacctacacatttgagcaacgagagctcgacgagagcaaactgtcacgtgtcagctttcgttcggcgcgcccctccgagcgccgcgcgcgggagccgacgcccgccgctgctgctccgacctcctgtcgaccatcccgactcaacctcgcactcaggaacgatggccgccaacccgcgtacgctccggctctcggccagtcgcgagcagctccggaccgccgccgcccaaagagaccagcagccggctctcccaccacccgttgacggagccgacccgctcacttccatctgtgcggtcgccttcgccttgctcatccctgttgccgccctgggtctgctcgtaacgacgatcctgcttctcggtgagcctcgcgtgcgacatccctcgagcgaccacgagcatcagagctgaccgcacgctccctcgcgacagtcccggtgttgggcgtgctgctcctcccgtcggccggcggctgcatgctcggtgagcgctcctgcctttcgcttccgccgccgccccacttctgacagctcccgctacgctcggccagctctctgctactctgtcacaggtcttgcctacgctcagctcgctcaaatcgatccgccgccgtcggcacggaagccattcttccggctcagcctgcgtgcgtccgtacgacggcgcctgctgcgccgccctgccggcgttgaatgagtctgacccctgcctcgtcgtcttggaaagcgcgcaatctcacgctcggcatacgcatcttgcgctggagcatcgactgcgtatcgcttgcagctcgactcggcctccagtggtgcatccgcgaggtgatcgtctcgcgcagcaaggaggaggttgtcgcgttcgtcgtcgtctcccccttgtcatcgccaatctctctacgctgacacgtcttcgaccctgcagtgggcccgttgcctacagtccagggcatagcctcaccatttttcgcccgccgaggagcgctccgagctcctctactcaagtcgactcgagcaaggaggacgagacgcctggccagcacgaagcgccgctccgacccgtcatcatcctgctcccaccaccgtctgtgccgatccctgcgcgagccaaagacgtcctgctttcgctggcagcacaccagctgcgtctagctccggctgtcatcatcgtgccatcagcccaaggcttccctgcttacccggccgcgcagctcgagcactcggtcgcccacacgcgagaccacctcctgccctgggtcgcggccgaagcccggtcattcggcggcgacccaaatcgcatatttatcgtcggtcatggcgcggccggcgtcgtcgccgtctgggcggccggtctgcgcgacgccattgtcggttcgcgcaaggcgttcctttggcagcgatggcagcgcaagaagagccagagcgacgacgcccactggaacctcgactccgacgacgacgacgacgacagggacggtcaaaaggtccagcaggacacgccgccggatctgggcgagcttgatggtgaagacgtcgacgaggtgacgaacgggctcaagctgatcgacatctggggcacggccgacgctccgccccatgttgaaggcgtcatcctgtacatcgtctcagggtacaagcgactgtcgagctttgtcggctgacgctcgtgtctccccaacagcctgagtgtcccggccgacatcccgctccaaatccgcgaggaagccgcgctctatgtcgagcacctctcgtacactcggcgctacttcggccccgctcacgtccagtgcatgctcgcctcgcctagccaatgcctctacgcggccaagtcggtactcgacctcggacacccgcagatgctccgacgctggctactcgtgcacgggcgcgtcttctctgctgtgctgctgagcgcagccatttactgacgttcagcccccggtactttcgccagcggccaggacatcctcgtccctccgacacaggcagcgatgatgcaggagctgctactcggcctcgggctctcggacgtccatctgcgggttcgttcggccgagccagagtcgccgcggtgactcagccctaacctttctctcctcccacaggcgtaccgcgacatgggccactttgactcgatcgtcggtgcgtactgctgtctctcacttctcatagccgtcgctgaccctccaacatctctctagctctcgcccgaggcgccaaatcacactattgcggactcgtcatgcgcgacagtcagtgctgtcctccttagacaggtcgtcctctgctggtcatcgttctctgctgatcagttcccgcccatcgatagtccgcgctttcctctatccctcggagtcatgaccctggagctcgatgcgatggctttcaggaaaatgactcgctgggctggctgcaggaggagcgcagccctttgcagccggcagccggtcgaagggcgcgccgcagggccgcagtgaccgagccctccctcagtatgcgttggcctcatcacgtcctgttctcgactgaaccgaaagcagggcaagcgacaatccttgcgggacccagcgccggagaggccccctgcccatacaccgccatccagttgcccatcgctgctcgccagcccatgccactccccggaccttaaacttcaagtgcgcaggcacatacgcgcgcaaaggcgtccagtctggcagaaacatccattccctcctcttcgcacttatgcgacgaggacaacaacgccaccggcctgcttgatcttggcctcggcaagctccgagacgaagcgggccttgacgatgagcgggaggtcgggaagacggcccttgccaagcacctttacacggagagaatcgaagggttcagtcagccgggcgagacagttgagatagagggaaactaaccttgccatagccgagagcgagcgtgtcgacaacagggacgagctcgccagtctgcttcgggaagtcggccttctcggaggccgggacgagcgaccacaacttgtcgatgttgacagtcgggcagtagtgcgagttacgcgtcaggtggaagtgacgcataccgacctttccgaagtaactggagggagaaggcagaggcagaggtcagctgctggtcgagactcccgagtatcgtctgtcaggagcagcggcgcgacccggcctcatcgcagagttgcgcgcggccggtcacgctcaagagcgacgactgcccgcacagcgagctgcgacagccgagcgccagcgcatgctgtgaactctccccgccgctctgcaaccctctccgcctccttccctctccgaccgaggctggcgggccagacggacgtacccagggtggtacttgtcgaagttggtgcggtggtggtgctgtccaccagcgagaccacgacctcctggatgcttgcggtgcttaccgacacgaccgtgaccgctgtagagtcaagggcgggagggagggagggcatccgagggggaggacggcgcaggtcgagagcgcggagcgacgacatgtcggcgaacgaggcagagcagaagacggagacggtggcgcggtcagcgctggattcagcctttgatccgaggagagctcgaccgagagctctagtggtcggcgacggcagccggagctgcaagcagcgggcagcagcagcagcagcagcacgccgaagctgctcgctcctgctgggctggatgctccaatcgaccgaccgctcccggataacgtcgagctctcctcgcgagcgcgggagggaggagaacgcacgccgagacgtgtccgcggtgcttgcgggtgttggagaatcgggtaggcatcttgaggggtggtgctgacgactgacaggtagcaacgacgggtcggaacgagctcaggccaaggcgcgctcactcgcccgcctgcgcgcgcgcggcccgcagcggtgagcccgtggtaggccggggcattttcccggagagacaggtgcatttccccgggtggtatttttgggtaccggttaagcactctagggtcggcttgaaatgacgagacggctcaggagcctctacggctcgagcttaaaacgaagagggtatatgtatggaagaagaataggcagtcggttcgtagagcaacccgtcacaagtggagccaactcccaggggctgatcgtcgtgcgcgcccgttccggccacgcgtacaggatgtgcactcgtcttacaccgatgaactgctccctcggcatgcgcatcgctcgctcccctgcctgcgtgctccaagttcaccccttcgtcccctgtctgcctgcgatctacatgtgctccctctatcccaaccgacgcccttttctcttgctcttgctctctgccggacgatgcttctatcgtcgtactcgggccagcccatgccgaggccacggacgagaaggcagtctcgagcgcgagcgcagacgagcacagatgcagaagtccatccctcgacgaccctgcgcgcatccccgcatccccccatgctgcccttccccaagcccgtcccgtcccgaccgaggggcctgttcgtgcaaagaggggtttcatccaagtcttccaaacattgccatcgtaaagctcgagattactcgagcttgaggccaccacgtcccttcttgacctcggtgggctcgccggcagcctccttccgggcggcacggagcgtcttctgggtgccgagcctacgggagaggggaagaggggtcagttgaggaaagggcgagagcgcaagggcacaagggcaagaacagtactcactgagcgtacttcaggttgcgacggaactgcgcggcgcgagagcgatgacagaaaggagggacgtcagcgggtcggacgctactccgcgcagtcactagactacgcaagcccgcccgccagccggccaaggagctcgagcgacgacgtccagcatcgtggctcgaactctcgcccgacgagccggcgcaccagacgcgaaggaggccgcaccttagggtcaacaccgttcattgaagggtgacggttcagcttgggcttcttgattccgttcttgtgcgccttcttgttctggttgtggttggtgtggttcttcgactatagaagcgggacgggggaggggaaactcggtcagatggctggacctctgagagcgggagccatcgtcgttcatcggaggcggctgagtgacgcaggcaccgaagccagctcgcagctagcgccagagcccatccgacggaccagcccatttgaaaccccgacgacaaaggagcagctgggggaagaatgggccgctcttgaggcagaggtggacgaggtctctaggccctgtgccggagacccgaccgagcctccctctgcacgcgaggaagaccccgcaaccggtcggctggcggcacgcgtcccgaacgacagcccaatccctgggagctcgcgctgtgtggcttaaagggcgagctgcgacaagcccggtgctcgagctcggcctggaggaagccgcttgagcggagaagtgcccgctgacgcaggcggcccgcgcgagccaagtgccctgctctactcggagcgacgacgacgacgacgacgacgacaggaaagagtgagaaacggaccttggccctgaggcgcacaagagcagattgtaaggtcagcggtccaacaattggggctgtctgccgctcaaggcaggacgtacatctttgcaacgtgactcgggtggtgagggacagggaggggaggtcgagaatgcggagacgaaacgacgggagcgagccgaggcgcagaggagagcgaggcggcaggggagcgaggcggctggaggttgagatttcgattgagcggctcgactacgattgggctgctcgacttcagtcgatctcaatgcccgcgttcacgagtttccaatcaagcatgaggcaaagctacttgcgggtcggttcgggtgttgcgatcgacaaccctaggtgaatcgccttgcccccgcgcgcgcgcgctggcgcccggccgcgggtcccgcccgagctcggcttggagttcctcgccgcccggacctctctcctccatcgaagcaagcaaggtcaaaggtgcgtgcccggtgctggagtcctcctgtctactgtctctgacgtccctcgtcgtccgttgagcatcctcaagatgcagatctttgttaagaccctcaccggcaagacgatcaccctggaggtggagtcctcggacaccatcgacaacgtcaaggccaaggttcgtaggcgtccctccgacttgggcgacacagacggcccgacgcagtttgagcgggcgggcttgggctggcggctggcatcggggagcagggagcaggcagggcagccggcaggtcgagcgatcaggtcgtgaccggagcgtctcgcgctcaggcgtacgacagctcggccgaccgcgtgctctgctcggcctgctgggctcttggacttgctcagggatgtgacccggaggggctctgagatcgttgggttcagcgtagggaacagcttgctgacattccgctcgtcccactcttgttgcttccttcctgcgtctcgtcctgctcgctgcctggtcgccgccgcgctctgccgcgcccttcctccctcggccgtccttcccgcgcggcgctcctccctccaacagattcaggacaaggagggcattcctcctgaccagcagcgtctcattttcgccggcaagcagctcgaggacggccggaccctttcggactacaacatccagaaggagtcgaccctccacctcgtcctccggctccggggtacgtccgccgctccgtctttgagattccggacagccaggtggggagcgagggcagcgggtgggcgtgtcgggtcgaccggccgagcagcgagagagggggtcgctcgctttggcggcgcgcagagccctgctggcgtgcgcgacgctcgcctgcacacgcacgctggctcgcccgccgccttccgcctcgacccgccctgcccttcaacctggctggcaaccctggattgcctgacccattgagcgagctcgctgacgcctctcgctcggctcctttctctccctgttgatcgtctgcaggcggcatcattgagccctcgctcaaggtccttgcctcgaagaccaactgcgacaagcagatctgccgcaagtgctacgcccggctcccgccccgtgcgaccaactgccgcaagcgctcgtgcggccactcgtcgcagctccggtcggtcccttcgtctctcttggcctcgcacttgtccgcgctcgcggcggctgaccctgcctccctcctctgatctcctccttccagcccgaagaaaaagctgaagtaatctactcgcttcgattcgacgcgagcgagaaagtgtcggagagggagggcgtcgtcattcttgtcgagggcgacttcaccgcatccccttccaacacacgcccagggtttttggggctctctgccgatgaacctttccccctttcgcccgaataacacgctcggcttggctggcagcgagggttccggaaggatgggcaagtggggtctgtgcacgacgggcggcgggaaggtgtctgcggaaggagggcgtgaggaagggtcggtctctgatcggcactctggtgtccgatcagcagctgactttctccgaggagtcctgtcacgtgcgctgctctcgtgaagcacgctctcgtgatgcactgcggtactgagcaaggagtcgtcctgcgtgacagatgaagtttgctgcgagatcaagtcagactgtgaggagcaataaagggaggagtcaaggcgactgcgcttcagccttcctccgaccttgaccttccatctcaacgtcgacctacgaacgacgaccaagtgaaagaccgaactcaatgatcagctggcctcgctaggcacggaacactcgtcgacatgccgatttgcacgagctgctcggcgccggtcgactcgctctggaccgagtactcgtcggtcagcccagccttctgcgacctcatccctgcctcgcgagtcccatgcctctcgctgacctcgaccgcgccctctcgcagccgacgaacatccgcctgaccgtctgcgggcggtgcgggcgttttgccgacccgtacgtcgagcagccactgctcgtccttgcgctcgacctcctcctcctcaagccgggcgtctaccggcacgagctctggaataggggcgtctcgccgctgaaggccggtcgggtcgccgctagcagtccgaacgctattggtaggcctggcaaacgacggacgacgcgcgatgaggtgcgccgcccgctccacgagctgaacgttaggcacggtcgagctgatgcggcccgcggtcgctgccaagacagatcttgtccgacctgctgtttcgcctgagtgccatcactgtcgccgtcgatgcatgtgagtcgccttcctccgctcgcagagcctactgagactacgctgacaccctgatggccattctccttctccttccagacctcctctggactgagactcgtgcgtcacccgacagcagccctgcgcagcaccccgcacatcgctgaccctgccctgcgtatctgatcgccccgccgctagctgtcgacattcgaccttcagcatggctcctgctcttcgcctgcgccctcgagctggctgtctttcaggctggcgtaacgctagcctgcgcgatcgtcctcgccgtgcgtcgacggtggactcctgcctcagccgacatggccgctgccccgcccctgactcgcgagttccggtgcgtcacttgaccgccagcttgactcttcagacttgactatcactaaccggagcgagtccttcagctatatccttgtccctctcacgattgtcctctcgtcgctcccaaagacgctcctcctgctcctcctctcgctcttcccgcaaggccctccctcctcgtcgtcgtcctctaccgtcaagctccccttccttcaagctttcctagagaccgacttcccctcccttacgctctccgcacaccagctcgaccggccatggatcctccggcacctcctctccggcctctcgaacggcttcgcgctcaaggtcttgctcgcgccgctcgggatcggtgcgggcgcgagcacggcatgcatccttgcgggctatgtcgcgcggacggttgtccttccgctgctcggggttcaggtgggggctgcaagggccggttgaggatccatgagggtcgccagctggagtgtcgtcccgcgaaaagagggcccacgctggctcgagcgggtcataaaaagggtcatcagagaagagtggagcgcatgaggagatgggggtcgtaagaaggcagatcgcgagcggtacaagagggaggctaggggcgggctcgaggtcgaggaggtaggaggcgtcctacgacggcgtcaagaaaagccgaccgagcagcaaatcgctcaaaccttggccgcaacagcccagtcgtgcatgccctcgggcccgaggacggccttgaggagccggttgctgaggtcccagagcgcccagccgagcacgcggtccgagcactggcccgactcgcgcccggccttggccgggtccatcaggtacgtgccggagagcttgatcgagcggacttcgggcgaggtcgcggcgtagctgtccgggaaggatcgagagggtaaacggcacgatcttgtggggaagactaggagacgaaacgtacatgaccgggtaagagccctgctcgggcgaccggtcgaggacgcgcgtctggatggccttcatgaactcgcccatcgtcccgtagtccgaccagccctcgtggaagctgggaagtgggcaaagcaaagggtgagaggcatcagcaccgggtcatctttcagagaggagcggggtaagaggagacgcactcggtggcgacactgcccgggtggacggcgacgacgtcgatgttgtccttgcacttgtcgacgaccttttcgaaaaagccgtacttagtgctgcaggcggacggagttggagtgtaggcgtcaggacggcagcccgacagaccgcacgcgctactcacccgaggatctgggcggcctgccggtcaagagcgcgcaagtcagtcgtcagcaccaatctcagcgacgtcgttgagagaggttacgcaccttggtccggccgtagagctgcgatggcgagaggctcgggtcgttgatctcatcgagcgagccaaagtgcatcgccgtcgggcagaagcggtggtgctccgaggcgacgacgacgacgcgtgcgccaccgctggccatcgtggccgtcttgcggaggagcggaaggagggcgttgaacgcgagcacctccgacagccagttgacgacaaacgcgtgctcgatcccgtcggccgtcgtgtcgtgggcgcgcatgaagcccgcatcgagtacgacaaggtcgagccggtcctcgcggtcgacgagcgcgtcaaacgcttccttcgtctggcggaggtcgcagaggtcggcaccgaaccagacgacgtcagccgactcgccggcgcgggctttgatcgcagcaatggcttcggtgccgccttgctcggtcgacgaggtcatgaggacgcgggcgtgggcctttgcaaaggcgagggctgtctcgaagccgatgccacgtgagcctgggggtagggtggtggaaggcagttcggccgtcagtaacgcgggcggacgacgggaaaaagaaaggggcagatcaggacgcaccgccggtgacgaggaccgtcttgccgtgcatctcgggcgggacctgcttggccgggccaaagatcgagggcaggagcgcctggaggccaccagtgccgtggtcgcccgaaccgcggcccttgtcctcatcgggctggttgagcgtcgggaggggctggtcagaagtggcgatggaggtcatcttttccggcgagggagcggatcagcgagagggctaggacgagatcgaccgggacaggaccgactttgtggtagctgctggtgatggtggtggtggtgatggtggtcgttggtggcgaaggaaggaggggcgagatggccaagcctgcgctgtaacgctgcccggccggcatgacgttccgctgcgcagcgcgctcgttcgtacgtcgtcgcttcggacgaggcgcttgatcccaccctgaagcagcgtgctcgagcatgagtgagccagtcatgatcgcatgcggacccttcaacgcccgcggcctcctcctcggccgaagccccccctcccgcgaccgtagccggtcccgccgccgcctcccagacgcggcatgacaagcggcggcggaaggctcggcgggccagcaccaccgccaccagcgccggcgagaggctcctgcacgccgcttgcggtgccagagcggtcatcagacatccagctcgggggaggcgggcggtcgctcatgacgggtcctccgccgctgccgatacggcggccgggaccgccagcggaagagggcgtgacggccggctgctgctgctgctgctggtcgtcaacgcccattgaccgcggcgctcgagggacaaaatcgcccccaccccctcctcctccgcgcccggcccggccgcctcggaagcctccgccgccgccgcctccgctgcctccgcctccgaagcctcgcgggccggtaggaggcgccatgcttgacctcggccctgagggaggcgcgaacgccgatcgaacgccgccacctgcaccgccgcgcatcgccggcgaactgaagcctcctccgccgcggccggcactggacgggccgaggtggccgaatgcaggcggtggcgggccgaaggacggccgatgaggagggaatggggacgccactgtcggaagcggatctcctgcgcccggtccgctgccgagaggcgtgtagctggccggcgcatgcggcagagggggaggggcaaacgacggcggaaccgacggcgacgagccgggcggcgcgtggtagccggtcggagacggtccctgagagccaccaggcccgtattcacgccggtcgagcggcgtagagtagcgctcgccgtccgactgcgtgcggtacggctgctgctgttgctgctgctggggataaggcgggtggtcccggtccggatggatcccgaacgaacgagcggccaacagcggcggcggcagcggcggcgagggcgtcctcgtgctgccggccggcgcaccgcccgaggcaagccgcgtcgacggcggaaggctgcctgggtagaagaggggcgagtggtcgtgcgcggcaggagcgtacggtgctgaagggtaggccgcggaaggatgagaagcagccggtggcatctgcatcttcggagagaggctcgcgccgaatgaccagctcgggcccggccctggtaccgccgctggcgaaggcggctcgaccgctgccgaaggcgagacctgttgttgcgggtcgacacgtcgcgtaaaggacgacagagttgacagccgggctggcagggttgaggtcgagctcgaagccgaggatgcctgctgctggacggcgggctcgaccggggtctggggcgccggtagaggaggcggcgccatcagatacggccggaagcggtctgccgacggagggaccgtcggccgcattggagacgacggctgtggcgtgtgcagctgctgctgctgctgtggcggaccgggtcgaggcaattccagtgacggaggctcgctcctcggcgtcgagggcaccggttccgccagcacaggagcgagtgatacgctgtcgaggacaacgctaacgtcagttcacggcgggcaagaagaagagaatgatggtcggccgacgacgcacctctctgcctcgggcgtgacgttcggccgcgcagccgctagctctggcgcaggcgtcggcgtcggagcctccttcttgcgcttcgcccagtctttgaggctcatgcgtttgacgggcggcggcgtcggcagtcttagaggcggaggtggcgtcggctctctgagaggcagcattggcgcttttggcggtgcgggtgcgggcggcgaaagtggtgcttcgaccgcgctgcttgaggccggtccatcttcggcggccggcggtgcgctcatctcgatatctgttgactctggaacgagcgggagaatcggcggtgatgaaggcgccagacggccctcggcccggaccggcgatgagtcgggcgcgtccgagagaggtgactctggctccgccgtctgctgttgctgctgcaatggaggcgtcgtggcggccaactgcggaggtagaggttctgatggaggtgtcgtcggcggtgactcagattcgacccggttgttcggccggcgccggacgcctgaccgagcgacccgcgagacgagcggtgttctcagtagaggcggaggcgagagcgacggcgaccgctggggagttcttgggtcgaccgcattgccgtcgtccggctccgagtcggatgagaagtgcgacattggctcggtcagggtcgaggcatccgaggcgttcccggcgtcctcctctgagcggccgccctccatgtcgatgtcctcgtgcgagacgcgaaccgcggtgtcgtcgtcctctagctcgtgctcctcgacggcgaggaacgtggtcggctggaagacgccggcggccggcttgaaagcggcgacggaagcacgctcggtaaggactcggtcaatggcctccttgtcaaattccgcccggcgcttctcgtcgtcgcgccagccacgaagcgcgccgaccaggacgcccatgtcgggccgtttttgccgccggctgctccgcccgccgcccgacgacttgtctgcgaggccgagcagcggcttgctctctgcgacgcgggccatctgggcgagcgcgcagtccttctttgacggacaggcgcacgtgtaaaagacggacgagaggtgcgtcaggacgccggcgaaccgcggctggaggtaggtcgccaggccggggacgttggtcgagggtgacttgaggtgggcggcgaggattggctgaagggcgtggacgatgtggtcgtcgtcccagtcccaggcgaccgagatctcttcgcgaccgcggatctcgcgactcgcaaagaggccaaataggagcgtcggctcgttggcgctggcatcctcagccgaggcccccgccggtttctggcggaagacgactggccggatgacggcgttgggatggcagctgttgcgggcgaagcgcgactcgttgccgaagcctcgctggtcgatgatgaggttgagtggcgccgggagcgcgcggaccccgggcttggggacgccgagcgagcgatattggttgatcggctccttccggtagcgttcgccagcgacgacctcgccgaggacttcaccgatgaagtcgcctttggcgaccgggttgtcagcatagaggccgtacattgacggtcgagggtagactggtcggaggagcgacgtcgtgatagtcggatgcgaggccgtaaaggtctgcggcggggcggcagacgagtcgggcagcaccttgatgctcgtcgacgccgccaacgagatgaggctggccccgctcaggtagaccggagggaggatggcatcgagcggaccgaacgtcgcctgaggacccgaccactcggggacgatgggcgaggtaggcggagcgacactgggcgccggcggtggcggtgggggtaccaccgccggggcagacacaagtgccggaggcgccatcgcggcaggaacggcagcaacatcggagccaggtggcggcagcggcgaaatgaccgctaacatctctgtcagaggctctggcgccaaaggtacgtcggtcgcctcggcccgcggaggggcggcatcagcggtggccggcgaaggatcgacgtccatggcctgcgaacgggggtcccgggtcagcctgaactgagaacagcgacgtagagggagagcgagggaactgactgtggccatcgttcctgtcggctctcctgtgggcttggactcgtcggaaaccaccgatgctttagcctcctcggcgaccgaaggaagatctggcgcgcttgcgacgaccggtgtgacgggaagcgcggccaccggcgtcggtggagagggcggcggtgcaactgacgcctgcgggatctccgccacccagcgtttccgcacgcgctcgagcgcacgtcgcactcgggcgtcccggacgagacactcgcggacgtcgacaaactcaagcatccacgcctcgagccggccctcgtcgtcgagcccgtcgtcggtccccgagcggctgggcgcaggcgagccagcctgcgaaaaggagccaacgccaccgccggccgttgcgctctgtaaggtgcccggccgagaggaagagatgtcgatcgaggtcggatgcggccggggcgtcaatggatgctgggcgggtccgccagcagccaagggcgtcgaggaagaaaggatgtcgcgaaggagagcgttcgacttgcgcttgtgcgagacggggccggccggagaagcagtcgcaggcgaagtagtcgttccggcagcagcagatgtgcttggaccggcgacggcgttcggtgcagtgccatctgcctgctgctgctgctgttgtaagagcagcgcagccgcctcccgctcgcgggcgtcacgcgcggccgtgtgctggttggacccggccttgcgcttctttgcaggcggcttgtcggccggagccagcggcgcaggcggggcaaccgaaatcgcagaggaggcgaccgcagcagcagcggcgacggccgactcggcgacagtgggcgtcgtcgctagcgggtcggacacaccgccctcaccggcgatgccagccgccgcctccctcgcccgtgctgctagctcgcgctcgagctcgtcggccgccaggcgagccgccttctcacgccactggcgctgggcctccttcgctgccggcacatcgaccggccgaggcgagcagactggacagatgtagatgtcgggcacggccgagggggcgatgccgagacagacgatatggttccaagcaaaacagtggtcgcactggatcgtgaagccgtcgtcctcctgcaaaagccgcccctttgtcagtcaagacgctcatccggggggggacggcagcagcgacagccacgcaccgtcgattcgcagatgcagcggatgatgccggagtccgggtcaaggatgtgcaggccagaggcggccgcagcgacggctgaggtctctcctatgcctgcagcggcggcggccgtggccgccttgcctctgcctttgcccttaccaccaccttccttgcccaccccgctggcacgcttgcgcttctttgctggagcaggcgccggtgccagtcctgctgctgtctccgggataatggcgagcggcggcggcggcggaggttgtgagacggtcggcggcttctgctcgtcgtcctcatcggcgggctcgatatctgagctctggccgggcgagttgggcggccgccgcggaggctgctgaagcgtcggatgctgctgctgcttctgctgctgctggagggccggatggatgttgggatcccgaggcggcagcgagaggtacgagccggccgacgatgggccggtgccgtacgacggctgggggccgtagtggtgcgacggcggcgggggcgggtagtaagacgactgtccgtagtagctgccgcttccaccagcatgcaagccctggctggaggatgcctgagggccttcgaggtcgagcgactggaacggcgggaggctcgtccccgtctgcgccggcgtcgacggcccggcagcggcggtcgagccgtagtaggcgtcgtagggcgagcctgagccgcctcgggcggttgacgagctcggaccaccagagccgagcgagggcgagagataccgggcggatgggttgggcgtcggcgaggtcgctcggcggatgctcgacgttgtcgctgctggcaactgagacggcagcgggccaggagcagacgacgccgggacgacaaaggcacctggaaaggcgagcgcaggggtgggagagggcgatgcggccggcttgaacggtgtcgggcctgcttggctgctactgccgctgctgctgggtcgactgcctgctgtcagagccggcggcggtggcttgacggcctgggtcggcgaggttgacgccgaggctgggccgtcatgcagggcgagcaagagcgcggcgacatcgtcctcggccgacatgccgggatggcagctgctactagcgaggcgaggcgagtgctgggatggttgggtcgaggctagcttgtgcggatgagaaggtgacggcgccagggcgggcgcaacttgcggccgaagctcgaaggcgagcttgagggcgaagggaggtccgacgacctcagcccggcagcaacccgacaacgtcccctccctcaacccaatctctccctgatcatgctgccgtcgaaacaggtccctgtcgggtcgcttagcattcagtcggtgagtcccgctgtgtgctgaagcagttgggctcgcgccgacgctcatccgcgcgtcgtcctcccggttgctggctcggctgactcgtgcctcctcttgcgtccagtttcacgacgactcgccgcctttcacgggcgcaggcgattcggcaccgtacccgccaccgtttgatctgtcgtcctcgacctcgcccttggcgcactctgtcctgggctcggggccgccgacgccgggcctcagcgggccctcggccgctgcgtttgcgaggttcgccggcggcaacggcgcgagctgcccgagcacgagttcctccaacggcggcggcggcggtcacggaggctcgtccggcgcaaggcaagctgggaacggcaacggcggccgagcaaacggttctggaggacctgagcggacaggctcgcccgctccggccgacgagcagcagcagcagcgtcgaccggccagccgggcgtcgtcgtcctcgtcgtctgcgccggcgtcagccgatcagcctcacattgccccggcggcgacggccggcacgaccgcagctttggccggtcctagctcgtcgacgacgaccgtcgactcggccagctcgcagcagactctgacggccgcgcgctcagcctcgcccccgcgaccctcgcgctcggcctcgggcggcgaggtccggcacgcaaaggacggcgaggccgaccaagagtcgcagctcgacagcaatgctacgcccaacgtagacagcggccggttcctcgccgggaccgagggctacacgtttccgaggcaccggctgcgcgacgtctgggaagacgagagcaagatcccgctcgtcattgtcgcctgcggttccttctcgccgccgacgtacctgcacctgtcggtccacggtccgagcgacgcggtcccttctaccgctgaacttgatgtcctcccttcccaggcgcatgttcgagatggccaaggatcagatcgaagaggatggccggtatgagatcctcggaggctactactcgccagtgtgcgtcttttctcacgctccttacagccgaagccacgctgaccccttaccgtcgccatcaccagctcggatcattacaagaaggcgggtctggcgccggcgaccgaccgcgtgaagatgtgcgagcttggcgtcgagacgacgtcgatgtggttgatggtcgacccctgggaggccggccaggacagctaccagcggacggccgtcgtcctccagcacttcgaggaggagatcaacggcggcgagagcggcggtgtgaggtcaaagaatggtgcgtcgtgcaaagagtgtgcgctcgccggtctgctgcgctccgcttaggctgacattgcattggcttggcccgccaggcaagcacacgaacgtcaagatcatgctgctcgccggcggcgacctgatagaatcttttggtcacccgggagtctgggccgaggacgacgtgcgtcggcgtgatattgttgcagctttacgtctcgctgatttctcccctttctttcccagctgcacatcatcctcggccacttcggctgcctcatcatcgagcgcaccgggtccgacgtctgggccttcctcctcagccacgatatcctccactactaccggaagaatatcattgtcgtcaagcagctcatctacaacgacatttcgagcaccaaggttcggttgtttgtccggcgcggcatgagcattaagtgagtgctgccgacgagaggaagcgtacactccaatgtcgcggtgctaactataaccggtctcttgcgcacaggtacctgctgccaaactctgtcatctcgtacatccttgagcgcgggctgtatcggttcgtcttgcctctgccgatcgagtatctggttacgcggcgcctctgacgtcctggcggtgctttgtggatgcagtaacgcgcctttcaccgttccgctcgagattacgccgacgacgacgcccgcgccgccgcatgcgatcccgacgcctgagccggccgacgacggcaagacgttctttgtcagcgactcgccgacgactccggccactgcgctcccgcctgcaccgccagcggcgatgacgacaacgccaaagccggttagctcgtcgcaatcgacatcctcgtgacgtctcgcctgatcttcccgccttctgaaagtcgactcatctcgacctctccgctccatgctcgcaaactgctcgctcgcccatgcccccccccccgcccctcgttcgctgtacgatcgctccggtctcggaggtcgggttctgtctgtcgacggcccatcgcctcctcgccttgtatgctcgtcccctcgctttggctcctctttgccacgtcggcccttccgatctcccttcgctgcccatctggcgtcctgcactctactagaccccggcctatacacaaactggaatctcttcttcctcggtgcgagatcggtcgagtaaggggggcttgtgcgaggcggccgccgttgctctgggcgcttcacaacctgtcttgacgatctgagtcctatttgagtttcatctgtagagcagctcactagcctcacttgggcttgagctccttaagccgcagcttggcgttctgcttgagctggctctcgagccgctcacgctcctcgctctgcgccctcgccctcttgagaagctctgcctcgcgcgtcaggctgtcgcccgccggccggacgaccgtccggcgcgcggtctcctgcttgaacttggccgtcgcgcgctcaagtggcttcgaggcgtcctcctcctccatgaagaggtcgccctcgttcggcttgcgccgagccggcgtcgttgatgcctgccggaaggcatttgcttgcttctgcttgtcctggagcagagcctgcgacgacctggcctcggcgagcgactttgccttggccttctcggccgtctcgtttaccttctccttcaagatctcaagcagcgagcgcgacttgggcttgggcgccgtcgggtcgaccggcgggatcgttggcaggtcgaggtacgcccggatggccggcttcgaaagggcaaatgactggaaggcagtgaagccgttcgagaaggtccagtagagcagaactgcctggaggaagagaaaaggattagcgagctgttgccgtcttgacttgctggaaggccaagactcaccgccgggaaaccggccgggccgaggccgccgatgagcgggaccgaggccgggatcgtaaagccgccaaagatcgggataccaaagatgacggccttcttcatgaatgcgcggagggcgttcatgagctcgccgttggcctgggccgtagccgagggcggcgtgccggcagcgccgtactaggtgcgcgacgaaacagaatgggctgtcaacaaggggcacgaagaggagtcgtcggtcgacggtgaacgcacgtggatgatgcaccacgtcgcaagggccgaagtgataggcaagacgtaggtcgagtcggctgccgtcaggtcgtgaaaccagagggcgccctggaccttgagctgccagaccggcagcttgcacatggcctccaggccccagaaggtgccgagaaagacgggcatcgaaatcagcggggccttgagggtcgcaaacagcgagacgttctcgcgcttcatcatgccctgcatctccttgagcaggagcgccttggtctgctggtcggtcgccgccgccatcgccgcctggtactgcttcatctcgggctggaccttggcgaagcgcgcagccgaacgcatgccgccgaggatcagggggaacatggtggcccgggcgaggacggtgaagacgatgattgtcgcccacctaccgaaacgaatcacagcaagggtcagagtcggcgcgcgcaacctgcaaccaggggacagaaaacgcaccaggggataccggtgccgacgtggatgacctccatgacccactgaacccagcctgacggccaccacgagcagaggccctgggccttgagatcgcctaggtgctcgggcaggaagcgcagatcgacgccgttctcgaggatgccggtcgccgggtcgacgacgctacccatgtcgatcgcctgctcggagccactcggagtgaccgcagcgacgtcatggacattgtcgacgggtgcggaagaaggcctgggaggctgcgggaggttgggcgaggaggaagcgagggtaggttcgggggctgtgggcgtgccagtcgacgagacggggctcgccggaggcgggttcgggttgacgggaggcgtaggcgcggccaacgggctaggttcaatgtcggccggcgcgcgagggacgatgagctccggctcaatcttcttgaagggccagccgacggagaggtgcctggcctggaggagcgaagtcgtcgtcgctgccggagactgaccaagcgagctcgtcgacagaggagcgcggagcgactgccgggggagagcagcaagcgtatgagttggacgacgtctttagtcgtctcgttctgctagaaggacgcaccgaaaaggccctcgaaccgcacgcctgacgagggctggctcgaccaggcacagaggacgaagagcaggcaagggaggtcagctacgcgcgcgcactaggcagggcggacgaagaggcttacgctccaggcgccgcccgacaaagcgttctcggcagggccgctgccagcgtcagggcgaagggcgaggccatcgtcttgctggcgagaggagaaagttgaggagtctggaggtacggtcggcgtcgagagagagagcggccgacccgatttcggccggctcgaaagaggacgaggctcgagctccgcttcggcgtacctccgaccatcttaccagtcttcgccctcagcacacagacagtcacgctcagccgagccctctcgcatgccctcggcatcctagccctcctcatagaagcataccacgtttcctctctcgccacatggcccctccgcgctcgagcccaacgagggtcctcccacctcatcagcggccgaggcgatcggacgatgccatcgagctcgacacgtcgccgccgtcccgctcgagctcgccgccgctccgaaaggtcgtctcgtttgggacgccacacacgctccaggactatggctcgacgtcaacgccgcgacgctcgctcgatgaggaggacgaggccgctcgtcggccgccatcagctgacgtcgcggctggccgcccacgagctggaagcgaggacgacgacgacgacgacgacgacaatgatgagcacgagcgctcgctgctggccgagctggctgagctcgagacggccgaccttgccgctctcgagccgccccagagcgagcgctgggagcgcgcctttgcgctgcttgtcgcctgcctgctcagcgtcggctcgcactacggcagctacctgcttgggcccatcaagaatcgcattcagcgcgagatgggcacgtcaaacacccagttctcgctccttctagcggcgctttcgtacgtcctgccctatgctgggccgcgacccgaggctgacctgccaacacaggctcaacaacacctggacgccgctcgtcggcggcctgctgacggcaaagatcggcacgccgcgggcctcgatcctagcgaccggcatcatctttctcggccagctgcttgtcctcatctcgaccggcgccggcaactcggacgagtcgggcagcaagggtaatatcaaggggatggccgccggcctcttcatctttggcatgggcgtcagcccgctcgccgttgtccaggagaccatgttcgtacccgcgcgcgcgtcatggatccccgcaatcaactccttccgtcgctgactcgtctgccctcgacagcattgtccggtacttctcgaaccacggcctcggcgtctcgcttgctctcggcctcgtcgccggcaaaggcgcaagctttctctcgtccatcacgagctacccactgtcggaccggtacggcacgcgcgggccgtttgtcgtcagcaccggcctcgccggccttagctttgccgtcaacatcctctacctcatcttccacgcccgactgcacccggccgcggccgactcggactcgtcgcacaagtcggacgaggccgcggccgagcgcgtcatccagcgccgcaaggtcaagctgatgaacctctcgaagctcggcgacgtcttttggatctacattgtgcgctcgtcgccgacgcttcccgacggatgcaacttcagctgacgactcctccccccttctcagctcatgaatgtcttttcaggcgccatctggtcgcccttcctgcacctctcctcgtgagtctcccgtgcagccagcagtcatgggttcatcgctcatctctctttggtctggcgcaggaacatcgtccagcgccgcttccagcttgcagacgacaaggcggcctcgtacgcctcactcctcctcgttggcgccatctttctctacccgctcgccggcttcatccacgacctcgcccacaggcgacactcgcccgcggccggcccaggctcgtcgacgatcgtctaccgcctgctcacgctcgcgtcgctcttgacgctcttttgctttgcgtggctcgccctgccggccgagtggagcggctcgcctgtgccggcgctcgtcagctttggcatcggccacggctttgcgacactgctgctggtcctcgtcgtccctggcatcgtcgcgcccgagtgggtctcgaccgcgctcggcacgcataaaagcgtgcgtacttccgctcagatgctctcgccgaccggaagtagctgaccttttcgtttgcgccccgtaatcgccagatggagtccgcagcaaccacatttgctcagacgctctctggcctcctccttgacaaggtttcgaagaaaaagggcggctcggccggggacgagatgctctccatcctcaagaagcacccgatcccaccgagcacgcgcgggacctggctcctgattgcggctttcctcgcggtcaatgccctccagctactgtcgatccttggtctctggcaggcgtttagtcgtcgatgcgctcggcaggcggcaacggtgggccctggcgtgtacgcggcactgccaaaggcagacgacgaagctgtcgctgacggcgaggacgaatcggcccaaacggcggacgacggcggcccggaggctgctgcccgagggtcgagcaagccctcgtcacggaccttctcgacctcgtcccgtcggccactcctctggtccgagacggcctcgaccctctcctccgtcggctcggtcgaagctgcaggtggctcgaccgtcctcgtcgtcgacccgcgcgactgctcagaggccgagatcgagcgcggtcggtggttctttggggcgagcattggcttcctaatccttgtctgggcaaccttcggtgctgtcagcttgttcaagggctgagatccatgcctctgtcggttcctcttgccctctgggcgacatgtgcacgggtgctcgtacgcatgaaagggatggagaggcggcggctgcgcgctcgcgcctgtcatctcgtcgctcgacgaccttcctcttcgcgctgcccatcaactagcaccctcgcagacttcctccaccgcccttgtcgcagcagataggcctcaccatggtcatccacagctcgtttcccgatcggaccgacgtcgaatcctcgtccgctgcgaactctgcagctgcctcgttattatcgctggagtcgcccctctcgttggagcaaactgcccctccaagtcgctcgacgagcgcctcgccgccgggtcgacaccctctggatcgcgatacgagacaacgtgagtgcagatagaagcgagctgctgcacaagatgagcagctgctgaccacctcgtcgccctccacccgcgcacagcgcgttgatgcccgtccgtcggcgcacgctccttcctgagctgggcgacatgattcttcgcgaggcaaagcactgggatactgatctgttccgagacggccatgccgcttggctttggcgccagggtcgacaagatcagccgctcttcgtctgatcattcttgatgtctgcaaggctgccttgctgaccacggctgcgccctcatcaaagtgtcccgctattggaagacagtaatcgagacgtatgcgcgaaagtcgtggatctctgaactgaccatcgagatcatcgcgtccgccgaggaagaggttggtgccttgactcgactgcgcttcaacgaaggagcaagcataacaataaagcgccttccctccgtccctcgtcaggtaatcgtcaacatgggttaccctctcttcctcaataacatcgacgactccctctatcaagatctcgaggacgatgccctgttcgctttctacgctgaggaggaagctgcggaagacggcggactcagtgttgcatgcgacgttctctacttgactctcaatgtagagaatcggttctacctcttgctcgatggcaatgaatatcactccgagggtattggagtgagtccatatgcactccgtcacaaggtgcctcgctcgagactgaccaggacctacagtctcttccttaagtcgggctaaaaatgatggaagagtgcgacgcggtgactgccttcgttccttggcgggcctacatttcggccatttgccgcatccaagcggccaaggcatacgcgtacgaccgcgactactaccacgaggtcgctgattcggaccagtggcaagactcgtcctacgacggctagcacctccttgttccgagttgacgctgagtggacgatttgttcccctcgttagcgctcaattgcctcgatgatcatggcatcgatcgccaggaatggcacatggaggatgagagacacagaagggggtcataagtgaaacggatcggggtataagcaagggacggtatcgagcaagggcagcgccagtggggggcgtcaaggggggcggatcatctagtccttccggcggcggctggtgccgctctttcggccgccgaggtcgtgctcctggacggagcgcaggaggtccttgaccgagcggaaggccttctgctcggcggccgagaaggcggcgggcgacgttgcgggcagaggccgatcggcgaacgtcaggagcgagtagagcgaggcaatctggtcgccctgtcgagtgtcaaggtgaagagggtcgtcagcgtcgcggtctgactgctgagattgctcaagcaaaggagaagggcgacggaccttctgctccagcgtgtcgatgacctcgcgaaggtgctcggcgagaacgttgcgcttcgcgacgttcgaggccgcgtcaatcagcttgtactgatcggcgagctcgacgtagattctgtaaggcaaacaagtagagagcgctgtcagggcgagatcacaagagaagaggacgagacaggagaggacgcacgtcttgtagtgcgcgtagtcgtcctcgagctcgcgcaagacgcgcgcgaggaccgtctgaggcggcaggcggtcggctccgccgacggccgcggctggtgccgccgtcgacgactggcactgcctggcgctctgaccctgttgctgctgctgctgctgctgccgctgacccgaactcgagcgcacgcgcgaccgcgaaggcgagaccggccggaccgtctcgtccgctcggccgtggtcgtcttcgcggaggtcgaccaggtcgccctcggggatgaggacctcggtctcctcgtcgaggtcgagcacgggctcctcctgctcgaatgaggcggcccaggcggaaggcggcgagggaggcagagggtagaggtgtggcgcggtagccgttgacgtgggtcgggagccggctgctgccgtcgagaagcgcgatcggggtcgtggggatggcggagggagaaccgaggccatccggggtgaggagggagggagtggtggcgagtgttggccggcggcggccatgcggaggccctgagtgtcgtcgaacgatgcgtcagatgtcagcaaaaagcccgactagacagtcaaggtcaagacgcacatcagagagccgcgagaccgggcgctcgacgggcgacgtccttgccgaccgtcggtcctccgcccggcgaggtcggtccgcgtgcgtctcctcctggacaacgctcagatcggcccggccgccaccgacggcaaagcccagaccttgagtgtccgctgggcgtcggtatgcaccgccgtcggcctgctccgcgtgtccgtaccgctgctgttgctgctcctgctgctcccagagccgagggctcgtctgcgcctccgcctcagtccgctgccttccctcggccctcccctcctcgaacgcccgcctcagcccgccgacctcgtttgaaagcgaccgcacctcgtcccggagccggtcgacctcgcgcccgcgccgggtgagttcggcctggtcggcctggcgctgggcctgaagctggctgacaaccgcttgctgagcggcgaggtcggtctggagctggacgacttgggagcggagcgaggcgacgagcgcttcgaggtctgagatgtggcggagccgggaaaggcggtcaatcgacgacgttcgcttgacgcgttcgagcgatgaggaggaggacgcacccttcttctgttcgacaacctcgtagtatctccgctcccactcgccctcgccctcatccctttgctggtcccttccaagccgctcgcgctcaatcgcccactcctcgcgcgccgcctcggcccgctcgcgcgtcaaccggagctcgctctcgagcgtcgcgatgcgccggtgcgactgggcgttttcggcctcgagcgagaggagccgggtctggagcgtcgagagctcagggagcgggtagcctgttgtccggccgagcgacgcgcgggtcggtcagattttgggacggatgagggatgtaggggagaggagaaagggacggacgctgagctggctcacggccctcttggacggtcggccgcctggcaggccggagaggcgtttcgcccacggcctcgctcagacccgtcacgtccggcaggtagaggctcggctgctgatgctgctgctgcccgcccgcacccgagacggcccgggcgcgcgcggcctgctggctcggccgccgattcgcgacggggctgtcggccgcagccgtcatcgggcgcttctttttaccgttgactcctcctccaccaccggaagtcgagcgtcggatgccagctccctctccctgcgcaggcgaacgcatctcgcgcaacggctggttgtactgctgctcacgccggtggacgagcagctgatcctcagccgtccgtgcgagtgtcgtaaagagtgattcttcggtccggagcggcgaggcgacgcgcgctggatggtgatggtggctgctcgcgcggggcgagaaggacgaggtcgtgcggccgagggcgtcggcgagctttgtccttgccttgatggaggtcgcggaggccgccgttttgggtgtcggagggacttcgtcaaagccgtagccaaggtccgagaggccgaacgtgaagacgccgtcgacggctggcgcagggcgagcgccgccgccgccgagcatcttccccagctcacgctcgtcgtcgaaccccgccgatgcctgccgggggcctcctgcccggcctccggaggtcgacgtcgggagacctgagccgacgagaccggtccggagcgtgatggccgacgcatgatggccgtttgtcgatacgggcgagggcgcgttggcgagtccgcccgcgccgccgccggtcgtgttgaacgacgagccgccgttggacgaccggcggccgtgctgggcggcggagaggttggcggcgccgtggggcgagttggcgcgtgcaaactcgactgaggagccaaagtcgtcgtgcgagagcgagagaaggctctcgttggcggtcggccggcgatggttgagcgacggagcatggtgcgagtggcctcctcctgacgaggccgagtgctcggcccggctgagataggacgacgatgcgcgagaggacgacatcatgctaagctcttcgagcgcgcgctccatctggagccggtcgaggtcggcctgcgagtgcgggatgtgggccgtcggcgggacaggcaggaaggacgccgatgaggtcgaggcgagcggctgctgctgctgctggcgggcgacgccggcaaaacgtagcgagcgaggtgaaggcgagggcgagtgggcgcggccagattgctgcgacgacgacgcggtcgacgacatgagaaggaaaggtgaggtgtcgctaaggggcgagggaaggaggcgggcgggagggctgacaggtcgggcagcgacgaaaacaacggtcaggcgcgtcgcgtgcgtgccaggctcgaagcctcgctaaccctaagttcactcggccgcgagcggaatttcggccagaggccagcacgtcgtccgcaggcgaccctcctgtccagcctacttacacccacacccttctatcgaccatggcctcctccagcagctcgtcgtccgacctgattgactcgcgcgtttcgcccgttcaggtcgacaaggccgtccacgccctcgtcgcccacgccaacaagcaggccgccgaggcctcaaagacggagctcctcgaccgcgaggaccacgtctggctgacgattgggacaaagaagatcagcagcgtcaagaagctcaagccggcaaagatgtgggtcccagcagtggagtctggctggagggtagggctcgaggctgagcgagcgcgactctcggggtcaactctggtcgcggctcctcttgccctccctcctgccggcgcttgtcaagaggataggacgtccctctgatatgccctccttctcaccccccagcgccctgcccttcccgctggtcgacccccggacgacctcggtctgcctcatcaccaaggacccccagcggttctacaaggacctgctcgagcagcacaagatcaagtttgttggccgcgtggtcgggctcgagaagctccggggcaagttcaagccgttcgaggcaaggaggcagctcatgaatgagcacggcctgtttctcgtcgatgagcgcgttgtgccgctcctgccgaagctgctcgggaccaagttcttcaaggctaagaagtgggtcccgccccgtggcgctgcgtgttaggacccatggctgacgttcctcctctcctcgcccccgcaggcagccgatcccagtcaacctgacgcgtaaggatctcaagggcgagctcgagcgggccatcagctcgacctacttccaccactcgcccggcaactcgcacgccgtccggattgcggccctcccgccttccaacggcatgacggccgccaaggtcgcagagtgtctcaaggctgcgattggccagatcggaaagctgatcccgggcgggtgggagaatgtgagcgcgctcaacgtcaagacggcgagcagcgttgcgcttccggtgtgggttgccgacccggccggccggtggacgggcatggaggacgacgacggcatgggcgcgtcggaggaggacgcaagcgcgggcgaggacgacctcgtcgagcctgcgccggcaccgacgacgacgaagaaggccaaggcgcccgcgcccgtcaagaaagctaagacagtgaccgaggcaaagctcgtcgcgcccgcgccgccccacccggcatcggtcgtcccggcgccggcgtccaaggccgagtcaaagaagaagacgtcgtcgacgccagccgtcgccgacaagaagaaggtttcgggccagagcgcgggcaagaagagcatcaaggagtcggtcgtcggcaagaagggcgggcccaagaagaagtagaggctcgcttggccttttgctcctctgcccctctcgcagcatcctttgccgccctctatcctcgcaggctcgtcgcgtgtgcaccgcggtcggtccacacctttctccgccgaggcatcaccttcttccaggctgctcgagccctgtacgatgagactttgctgctgtttgtctggcgattatggcggcaggaacacgtaggagacttcatgctaaaagatgagatcctcgtcgtcgtacatgtccttgatgagcttgtggatgtacgacggtgcgtggtcgccgctacgagggaaggaggcagagaaggagcgtcagctgattggcaaactcagagagtttggcacgagggggacgcaactggtcggtgaggaagacgtcgatgagctctggcccaagatagtcccacttctcgttccagacgtcgaccccctggccgttggcatctgcaaacgcaaggacctcgcctgggtcggcccgctcggcgccttcgcccgcgacgcccagcgtccagctcggcgtgcacttgtaggcgcccgagacgacgacgacctggaccgcgtgggcttttgcgagggatgcggcgaggagcgagccggagggagcgaggatcccgcccgaggggaggatcaggtgtgcggggaggagtagcttcgacgtcgaggggaggaaggacgggaggtttgcgtcgggcaggaggagcgtctggagcgggtaggcacccgagctgagggcgtgcgcaagcgagaggccgaggagtgagggcgaggtcgcgaggacgaggacggtgaagggcgaggctcggctcgcgccgtggccgtgcgaaagcgagcgcgaggccgaccggagaaacgactcgatcgacttagaatgcgacagggtcaggatcgtctcgcttgaattatcgatcagggacgatgctcgtcagtccttggctggcttaacgctggaagagggtgagaggagaacgcacgacgagtggacgtgcgacgagccgcccttagcgacattctcgacgaccgtctcaagctcgtcgatgacctcctggatcgcctggatcaggagcggcttgaggctttgaaccttgtcccccgccgacgggctcgttgcgtcccacgtgtactctgccggctcgagcacgggcaccgaacccgtcgtcaggagcgggcttggcgccgtcgacgggccaaacgggtccgagaggagaccgagcgggatcgcgaggtcgccagccttgcttccggccgggccgtgctggccgtgattgcctggcgcacccccgctggccgctgctgctgctgctgaagcgctgtttgagaggaaggccgagagcgagaaggccgacggcggtcggacgtgcgactcgccgtaggcctggatcggcccctgctggctcaggccaaacgcccgccactcttcgcggacgagcttcatcaccttccggacgacgttgccctggacgcgctcggcccggttggcctgctcgagctcgcgcccgacgagacggaggaggaggagcaggtcgccgagcgacgagaagcgcgcgtttgagacaatctgcttgaggacgagcgcggtcgaaagggcgatctcgagcgaggacgagaggagccgccggcggagcgagagcgtcagcgacgagagtgcccgggccgacgtcttgttgcggaggagcgaggccagcgtcggctcctgagcgggaggtgcaggcgccatggcaggggcggctgagcggggcggggctaggcgcggctgggttgcgaagaggcgagcgtgctaccgttcggacgagcggctacgggcaaagattgagtcaaacacgcagtggggtgggtcgtgacaggtcgccgggtcggagggagccgcagggactgtcgacacggctgaagtcgataaccctaactctccgccgaggtgcgcgactggcctctgctcgccctcgacgcgacggccgctcctcctccataccatttagaccagacctaagagacgaccagcaggaggaccctaccacgcggacgaccgcttgaccttcactggacgcccatctagctccttcccgcattcggccgccctgccatgtcgtacgcgccggcctacccgtcgtcccaccggcggtccaagtcaaccgtgatggacctcccgccgccgtcgtcgtcgcccttcccgtcctttgccgccttccgccgctcggctggcgaggccaacagcagcagtagcagcagcagtaggcacggtagcagcagctacccgagcgtgagccaggccgtgacgacggcgcccgttgtcggccagacccggcgccggctgcggacccacctcaagacggtactggcgaacgcagagtcgcgtcgcatcttctggttcctctgcctcaaccttggcttcatgatggtccaactcggttggggcgtctggacaaactcgcttggccttatttcggacggtgcgcgaccctctcggcgctccccgctgcttcctgtcccggggctgacaacccgctctctccctcccaccgcctcccgcgcagcgatccacatgtttttcgactgcctcgcgctcggcatcggcctgttcgcctcggtcatggccgcctggacgcccgacaagcactttacctacggctacggtcgggtcgagacgctctccggctttgccaacggcgtctttctcctcttgatctcggtcttcatcatctttgaggcggtccagcgcatgtaggtctttctcgactctgactgtcgggcgggcactcggggctctcactgacctgtccctttctgccctccttgccgccagcgttgacccgcccgagatgcagaccgaccagctcctgctcgtctcctcagtcggcctggcgatcaacctttttggcatgtttgcgaccggcggtcacgcccatcacggtcactcgcatggtgtgagtctacccgtccaggctgcgctcatctttcgcctggctgatctctctatctttacccccccccccccctttgcgcggctgctcgttccagggcggccactcgcacggcgcgccgaaaccgaaaccggtccagcccaagctgctcaagaaggcagcaccggcaccgacgatgctgccgcccccgccgccggcctcgcctgttgctcaccggcacggggggcactcgcacggtcttgaggcggagaaggcggcagttggggcgagcgagaaggctgagggcaaggctgggcacgggcactcgcatgaggtgagacgccgtgtttggttcaggttctcggagtctcctcccttccgctgacactcgtctctccttcgcaacagcacgctggccactcgcacggacatggtgacggcgcgcacggcacgggagacgtctgcgatgacgacgacgacgaccatgaccatggcgaccatggcgagcacggccaaagcgcaaacatgcgaggcgtcttcctcgtacgtcccaatcgcgcgacccttttgcttcaaattgctgacgtctgttcctcctctcgcagcatgtcctggccgatacgatgggctcggtcggcgtcattatctcgacgctcctcatccatcaaacgggctggaccggctgggacccggttgcctccgtttttatcgccctcttgattggcgcgagcgtcgtcccgctcgtactcgatgccgggcgtgtgctcgcgcttgacgtcggcgacgaaatggagcgcgacatccggatcgccttgtcggaggtgcgtctgccgtcatcctcgtgctccggacctcacgtggaaactgacacatgtcttccttgcgctggcagctgcgagcgattcccggtctggcgtcgtatggcgccccccgcttctggcccaaggacgagtcaacgctcgtcggctcgattcacatccacctcgctccgctcccttcctccaccgcgaacggcgtcgctatagatccgtcgacgagggctggatcggcggcgaaggagcagcagcgctacgccgacgtcgccaaggtcgtcgcccaggtccggcgcgtgctcggccggaggctccgagggctcgcagagctgacggttcaggttgaaggtgggaaggagggcgggtgctggacgtgttgaagggtgtaaggggtggctggacactctggatgcgcatctgtgttcgctggcagatctgagcaaggggcgaggagcgacaggcagctttgtctgtttaagacgttgtggtgcagcagacgtcgtcgagaggcatgtcatcgggtctaggagcggccgccctcggcctacttccgatcgacgatggcgaccttgtggtattacgtcacgtcgaatgcctttgcctctgccgcctggatgcggcatataatcgagacgcactggcgccacgaaaggatgcaggcgaccgcattgcagtcgtcgtcgataaagagattgagcttctggatctgatgggggacaggtacgtactaaagctctggattcggaatgctttctcaaggtgaaaacaaaccttgtgctcttttggactcaggagacgaggcccaatgccatgctgaaatcaatcggtggtgatgtacgggtagaggacgaagaagccatcgtcaagcgcctctgggtcgtccgtatacgcgcaattgtggcgaagaaaggcgccgagcgcgtcgaaggaggccttctggtagttgacgtgaaggattagaatggatgatgcttcgaaagcgtcccagaagtgcttttggcaagggggtgtcactctagtcagtggcaggaaagttgcagggtaaggatcaacgggaaaattctgctcatcagtgtccaggtcgacctctatcccggcgccttcgcccactgagcacgtgccacctgctcaatcgcagactgccagcgccacgagactgagcaaacgacagtggctggccagggtgtcagcaaacagattgcctgcctatgagccaggcgcaggcagttcagccttgtcgtctctggcgccagagctaagcagcatgtccgtcggcaaacaccgtcttgtcgcgaccttcataggtcggcgctgcctcaaggatgaggtcgcccagctcgggcggcagagtgtgcgggccggctggcgcgggaccgagtgtgagcgagcaggcaacagaagtcagaacgccgtcagctaacgagtggtcaagcgacaggcgagcgaaagagagcttcaggctgggtgcactgtcgggtgattcgttcgacttcgagtggttggcgagcggctgggcgagaagtcgtccgatggtgatctgcgatggagcagctgcggaggctgcctgcgcggactcggggagacgggcggccgcgtgggccgaaggcggtgtcatgccggcttttgcgccttgagtttggagctgctcagaagatgtaagggaagaggaatgatagagggaggatgcgagccgagggtgagcgtcgaggtgaaggctcactttgaaacgcgcgaggcgcccctttgtcgtcgggcgtgccatgcgtacgagacggccctttgtgcacctatgactcgctatcaacccttccttccgtagtcccgggaggtccctagcacggtcgtagccaggcttagcgatttttcattctagtgcgcgggactatggcccgctgccaggcccgtcacgggcacccggtgcgagcgccgtcgccgcctcgcgcacggcgaccacctgctggccgtcaacatcgccgccgccgcttgcgctgtctcccaggatacgtcggccgacgaggtcagcgccggcgaagagaccgccggcgtcgcggacgagacgctcgacctcggggtggccttggcggacggcgtagtaaactggggtgtgtctgcgagggtgcgctcacgcgagcggctcagtcaaagggagggataatgcgagagaacgtgcgaacggaggagacgtacccgagcatgtcacggacgtgcacactaccaccccgctcgagcaggatgcggacgcactcggccgagccgtgcacgcaagcgacatggaggaggctcatgccgacgctgttgagcgcgttgacgacgtttgcacaggccgggtcatcggcgctcgtcggtccttgcggggctgccgaacccgacgaggacgccgagtgaggcgagcggggcgcatacgtgtcgagcagggagcgtagcgtcgccggactcgaaggtgcggcgaccgacttgaacagcagctgcgggaggatcgccgcttcgagcagatgtgaggcattctcggaccggccccaagcagcaacctcctcgggtccgtccggcccgcttcctccgtcccgcttgtggtgtaggtcgagcagagcccgaccgcccgtcagatcgaccgcctggacgagaagtccgttcaggcgctcgaggtcgtcagccgctggcggccgggtcgaggcggtcgagggcgaggagatttcgcctcggagcgaggtgctgagcaggtgccggacctggtcggatgagagctgcttcgagagcaggtacgagagctttgtgagagcgcactggcaagggccggggaagagtagcgatcggtcagtctcggcgaacgaggttcgacaagcagcgaaggctgaacgagcccacctcggtcgtcatgtctgcagaggtaaatgggcgaggtggtcagacgccaagcctaacggacgagacacaaagggcgggaccggcctcctccagcgacgacgcccgcccgctcgagcgcaaagccgccgctgtagatttttgagacggagccctggctgcactgggtgacgttgacgacgacaatgccaagctcgcccgtcgcgcgccggagctcggccatgatcgctgatttggacggcggaaaagcaaaggatcgcggtcagctctagggcaggaaagcggtcataacgcagccaatgaagcaccgggcgactcgggcgcattgcctgcgccaaaggtctcgaggacgacgcccttgagcggccgatcgccggcgtggtcaaagaaggaccggaagaaggcggcgctgatgccggggaagatgcggagaatggctgtggagagggacgctggttaggctaggagaggctctgagtagcggctggcggctcactgaccaacgtctgggcacatgcctgcggacagtcaaagatggggctgaatcagcgggagcaatctgccgagttgcatagaaggcagcagggctgcacttcgatgagccctgaagggcttgatgctcctgcaccggcggacggccccccagtcgacctcgagcgagatcccgaccttgacgagccacggcgggctcccctcgctcctgaacgcctcgaacgagtcgttcgagcccttaaccgtccgattcccgcgaaagacgcggccggcgaaaaagaggccgacctcaggcagagtcgggaaagtgccggcgacgatgagcccgccaaggacgttttcgtacgcgtcgttccgaagctggctgagcgggatctgggcgccggtgacaatcacgggcttgccgaggtcttcgagcaggaaagagagggccgaggccgtgaacgacatggtgtcggtcccgtggaggagaagaaagccgtcaaactgggcatagttgagcgagatgtcggtcgcgagccggatccaatctgagcgacagaggagcgagaggtcagaagtgggccttaacccgcaagagcttcgcttgacgcggtcagacctttgctcgagacgttggacgagtcgatcaagggtgagtactgagggacagagacgtataactgctgtcagtttgactgaaggcaggctcgacacggcttcgaggagggaccgacctcgagtacgcagtatcggatccggcggcccgtttggtcaaccggcggcgtcacgaggctctccacctcgcgcgcgaccgaacggacggccggctcctggccacagacgtcgccgtcgtctgggagcgaggcatggacaagaaagtggtgctgctgctgctgctgaggcgacgacgagccgttggcggttggcggcgctgctgctgttgctgctgagccggcgggtgggggcgagctcggacgcgaaacggcgggagacgagccagaggtcgttgctgtccagttgatgaacgactgtgacgaagccgtgtgcgagagaagctgcatacgggcgcagaccggtcagatgggcggtcgtgcgcacggaggtaggggcatgcggccgctggacatccgaggggggacgaaccgactcgccggcggggtcgtggaagcgcgactgggccttgagcgtcgccgtcaggaaaccgggctcgggtacgtagctatttgggtccgaggagaaggtggattgcgcaagaggagcgggggcccaagaaggcaggagcgaggagggtcagctgaccgtggtcgcgtcggtcgttcgggcgacgggcgaccgagtcgagcagcgctcttttgctggcaggagcaggcagcctgatgaacatgtgacagcaagagaatgattacgtacccgttcgccgaaggcagcatgccaatcgtgccgccagtgtctgtccggataggaagcaacaagagaggtcagcctagtcgggacgggtacgaggggtcgcgagaggagaccgacagaggatgaggacattggcgtcggctgcagagcgggagcgacggctgaaggagtcagtccctgaaagcgagttccttgcagcgaaagctgacctgctggcgggcggtcggtcgacggcatggttggaaggacgagtgatggtcggagggaggaaagcgcgcccgtcggctcgcggcggccgtaagggcggctttgagcctggcattcaggcctggccttcgtccgacgtcagcctgcagagcgcagccggccggtgcgatggccttctctacactccctaaccctcttccagctcgtcaccactaatggctctcaagccatcgctcgtgcgtcatcagtcttctatctgctcaaactaggctgaccacacgcgcagtccttcctccgcctcggctcgccggccgcgccgcacgtactcgaggtctagtgcggccggctctcctctcctcgcttcccttctagatcgtccggattgaccgagctgcttccttggcagcctcgactacctctgcccatacagcgcaaagatctcgcgctctctcgcagagcacgtcgtccctcgttcgttctggaggcctctccctagacgggaccgacgctgattcgtttcctctgctccactccgccctcccgcccgccagacctcgaagagggcggcaagctctcaggccgcgtccagctcatcctccgcctgacgccccagccctggcacgcgacttcgacgctcctccacgaggccgccctcgcctttggcaggctcgcgccagagcgcttctggccgtttagccaggcgctgatggacggccaagagccgttctttgaccggccggcggcgtgagtgcttgccgttcttgagcctcacaaggaggtggaggttgatcaactgatttgactgctttcccttcatctccttccgcgcccggtcatcagcgacaagacggtcaccgagatgcgcaaggagctcgccaagcgtgcgtccccgctcttccaccgtctgcttgcttccctgagaccgtctcgctcaacctgctgacctccgccatgtgtccctccctccgcatccagtcgctgccccgcacctcgcctcctccgcccaggccgacgagctcctccagcttttgacgcccaaaggcagcccgaacggcgggcttgggcccgtcaccgacgacgtcaagtacggcatcaagctcggccggcagaatgccatccatgtcacggtctgtcttgccccgctttgcgcccgctgctttcgccaggctctcggcagcttgctgatcctgactgactgatgtcgctccggtttctttcagcccaccgcactttgggacggcttggtcgacggcgccgtctcgtcgtcgttcggcgaggccgagtggaagcagttcttcgacgagcgcgttgctatctgaaagccgggcgtgagtgaggggaaataggacgtagggtggagggagagggggtctcttgtatgcgctgtttcgaagcgactccctcttcgctcgctagatgggcagcaagtgcaggtcctcgtggcaagttcgcagttggcggttgaatgacactggtgagtctgtcgcagcccctgtcgactctgctgacacgccgccaggggtacgaaatttcgttgccttcgccttccgctcttcctcttctaaccgtcactcactcataccctacctgactggacatcaccccaagacttgccttccacacccaggtctgtctactgcccttgaccatgttacaaagagttgctgaccctcaccgactccatttctcagccatgccgcccaacccgcactacgacgacccccgcggcgacctcgtcctccgctcgtccgacaattttgacgcccgcgtccggtccgtcaagctccgcggcgctgcagaggtcttcaactcgatgtttagatcgggggcgccggcggcggctcgtcagcgtctgagcaggagacggtcaagggactgccgattgtcaagattgaggagaagggcgacgcgatcggacggttcctccagtttgccatcgtcccgagcctggacgcggagattctcaagctggccgacgctatcaagttcgtcgcctgttgcagctgtcgcccgaatcttggacggcgctgacgcatacagtcaaccttacagaatcaggaccctcaagctggccgacatgtacgagacgctcgtcgtcactgcgctcgttgtctcgctcctgttcgcctccgtcagtgagattcccgccaccatcttcgctctggcggctatccacggcaacctggcgctggcgctggcccggctcgccctctcggagatgggcaaccgtctgaccgtcacaatgagcgaccagagtgtcggtgggctgcacggccagctcaccgacgtcgaccgcgacctcttcgtccgcatcccaacgcgagcgatcctgaagtacctcgaacttacaaacggagcgctctctcccacttactccactatcaactcatagttggtcagtcggtggaaggtgcgggcgaagttatacaccatgcgtgcatctgtctcgccttgagatcaaccaggctgaccttgacctcccaccctgcaaccggcagttcccgtgaaggtctctcgacacgctcgcagcgatcgaatcgactggccctacctctccgtcgagcgtcgtcctcagtctctctgtattgtctcccatgctttgtcttggcccgacttcgctttgacgcgctcgcgagatgggctcaatgggggcatctttaggtcataagcggccgaggtcgtacagggtgagagggaccggaagaggaggaagccttctcgacggttccccactttgagagatcaaggaggttcgtttcgtttttgctagggcgtcggcgactagtcctcgtcccagttggcgttctgcttcggctgtaaaagcgaaggaagttagggggtcagattgggtagtctgcaggcgacagagtcaggtcggtcgcgacgcaccgcagcgataccggcctgcttggcgacaatgatcgagtcgacacgaaggaccgagacggcggcgtcgcaggcgagcttgatggcgtacgacttgctcgcgagcgggtcgaggatgccgagcgggacggtcgcaagcgtgccattgccctcgccctcgatgtcgacaccgacgtcagatccaccttcggcgtgcgccttggtgagcgcgccgacgagcgccgttgcctcgagaccagcgttctcggccagcgtccgggggacaacctcgagcgcctcggcaaacttgcggatgccgtgctgggcgaggccaggcgtgcgctcgccgaaagcgccgacaatcttcgcgagctcaacctcggtcgcgcccgcgccggggacaagccggccgtccttgacgagctggcggacagtgttgatgccgtcgtcgagcgagcgctcgaggtcgtcgagctggttggccgtcgctccgcgaaggacgatcgtcgccgtcttggtccgctcgtccgcctcctgccgaaggacagtcacccggtcgccaccaatttcgaccgtctcaaagacgtcgacgaaaccggcctcctcgggcgtcggcgcgccaacacgggcgagcggcgtcgcgccgcagacgcggcacagccggcggaggtcaaacttagacaggaccttgaggacggcgatgccctgccggttcaggtagtgaagcgcgaggtcgccgatgcctgagccggcgatgatgagcttgacgcccgagtcggcgatctccttgaagatctaggagaaggtcaaaggggagaggggcgggtcagcaggcggcttcgtagaatcaaagacgctcgctcaccgacgcacgttctccatctgcttctcctcgcccttcgtgaagtccatcatctcgccggcgttcttgaggaggacggtgcccttggtctcggtctgcgagatgtcaaggccgcacgtaaagacggccaccttcatcttggagcccttcttgacgacgccgtccggctcacggccaaagaccatgccgcggacgacgcgcgagtggttgagcgcgccgccgagaatcttgacgacccggaccgagtcgacgttgaagtcggcagcgttgcgcggcatgacggcgagcgaggcctcggcgacgagcgacgagaggaagacctcggatccgggctgctttgaggcgattgacggcgcaatcgacttggccagcgtcgcctgggccggcggcatcggcaacgacagaacagagagctctgaagacgggtcgggagggggtcgattgtcagcgtcaggtagaggcaggcgccgcttcctggtgtgagacctcgcggctgatcaagtccggcaagagccgggccaagcttggcgcggacggcaagtgccagcgtcccccttgatacggcgatggtgaagcaggcgggacgcactctcgagctcctcccgggccttctcggaggccatttcgaagccgaggacgacctcgctcggatgcatgcccatgacgagcaggttaacggcccgcttgagaagctcgccggcaaagatgaggacaaagttggtgttgtcgccgtgctcggcctcctgagcctgcgaggcgccgacgagcagcttggccgccgggtggatgacctcgatctcgcggatgatggtcgccgcgtccgacgtgacaaagagccggccgaggtggtttatgatcagcttgttcttgcctgtaacgggagagcatgtcagcgttttgtccagctctctttgcgcgagccagcagtgctacgccgccggcgtctcgacgactcgaatccgagcatgctgctcgacgccgacctgcgcagcgctcgagggagaaagagcgaggtggctcggacaacggaggggtcacgcaccattcggaccaaaggacgtccggacaatctcggacagctcgccaacggcctcgatgttgcgcaagacagcctcctcgaggcccgacaggtgctgcgaggcatcaaagagagggacgcgctccggtcagcgcacagacgctcgggcggcggctggagatgagctcttcagcggcgaatgtcgcggacagaccttgaagccgtccttgaagagaccggattggggcttggggaccttgagcgacatggttggaagattgagcgaagaagcgggtgaggtgaggaggagaggcaggtcagcttggaagcgcgaagtgctcgcgccggctgaggggcgaaaacgagagaccccttcctttggagttggaaatccgaagatcggggttcaagaacgcgtgcgctcgacgacgcgccgagctcatcaaggctgcagctccgcccaccgacccttcgatctccgttgcacatgccgtaccacctcgcatgagcgtgcctgtcctcccgaacgacggcagccgcctcgaggacccgctcgactttatcgccaggccaggaccaccggttgagccgccaacggttgcgcctgctcatgcgccggcctccgccgaccctccgtcggcgccacgactgccacctccgaccggcgccgccgccgtctatgacgacgaggacgtcattccgacctcggaccccgaagaggccgctgaagaggccgcgctcgcgccaaggaggagtgcaacggcaacgcaggccgagcgctgggcgagggagctcgcctactgggcgaccgccggccgtcgaggcaacggcctcgccagtcgcttcccggctgtcttcgccccagccggccagccttcctcaccgattgcctcaaccttagggcgaagtgcgtctattatcaacagctgagcatctcttcgcaagctgacgatgtcgcctcgacgctttccatgccagtctcggccctgctggccgcgtccgaccgcctgatgacgcctgcgcgctgggtccccccggaacccctcgagactccgccgccactgcctccatcgacgtcctttggcgcgagcttcacgctacggtcgcatccggccgcttcaggcggcagctctctcggaggctggacggcggccgaaaagggtaaaggtcgagctcagcagcaggcggcaagtccgggcggcgcacccgcagcggcacgcttcacaccgtcgccgacgccgtcgaccatcgagatggagcgcgccgtctcaccacccttttctgctcactcgagaagtttcaagtcgccctcttcggccggccggcggtcgccacgggaaaggccggtcaactcgttcggctcacccttgacgccagcgccgtcatttgcgccgctgccctccgctcctgtcgaccgccttctgccaccacccgcagctgcagtcatgggcgagcaagcctcgcctgccaatctccagccgtcgctctccccgcgagccgcgcaagagctggcagacgccatcacgcggctcgatgatccggcgacaacgactaaaaaccatcggtcgcttcgccagcggacgtcccttcaactcaacccatacacgcgcgaacgagccgcctaccgacaccttctcgcccgcggagggcttgaggcagcgatcgtccagcgccgggaggagctcggtgcccagagcggaggcgcgactgccgatggctctttcgtccctccgcccgagaaggagccagccacacacggagctaagaccaagggcaaagggcgcgtcctctcggacgaggatcgacgcctgctcgagaccgttggcggaccgctcccggccgatgaggacgacgaactcgacctgttcgcgagcgttagccagatgggcggcggcgagctcgcgcgctgggaggaggccgtccgtcggcgcaaggccgaggcaaaggccaaggagcggaaggaggccaagaagaccaaggccggaagcaaggcgtttccgatggatctcggccaggcgcagaaggagaatcgcgaggtgaggagccgtctctcgctcgctcggtgctgcttgtcgttgacgaccgcccttgcgactcttgattagcccttcaagtacgttcctccgccgggcctgctcgacaacatcgacgaggaggacagcgacttctcggcgtttggcattcaccgtccctcggcgcgcaccggctcgccttctcctccacgaccaaagaagcgcctgaagcgaccacagcctcgcgatagtcagttgtcagcctccgactctgactcgggccagtcgatcgagacagatgccggccgagcgcgacaacctgggctcgacaagaagcgggcgcgcatcctcggtcggatgatgcctgccgtcgccgctaaccgtcatatcgaccagctccgccgagcggcaaccgaccgcgaaagggcggccaaagctgcgcgccagcagggtggggcaggcggcgagacgaccgggcccgtccgagcaggtcagtcggtcgtccgtcgcgcccccggggcggcagccaagccgctcgtcatcgagggtgactccgagtcggatgagggcgacgcactcgttggcaacgaaccgctcgagcggagctcttggggccatcaccggcacctagacgcccttctcggccgtgactcgatcgacccggcggaagtcgcggcgatgtaccccgacgacggcggcttgcttggcgacaccgacgacgacagctcgggcacaatcgtcctgctcgatgacgacgagagtgaggaggagcctgcggccggcgacatccgggcatggctcaagctgcctcctgcagcagccaaggcggcgagcgtcgtcgacctcatgctcaaccgtacccgggcaaacgctcgtcccggcaggacgaacggcggcggcggcggtgggaatcgagcaggcggtgtgcggccgaccaagagccgaccacctgctcgagactctggccctgcccgtgccggcccaagctcacacgccgttcgcggcaacggtcctgctcgtccgcgcgccatcaaccgacggccaaagcagaggccgatcgccctcgacgacgacagcatctacggcgacgttgctcctcgagcaccggttgctcgccgtggcgtcccacaacgagcgagaacgggcgctttcctgcctcggtctgtcaccttgcggcgcgccgctcacccgccagtggtcttgcgcaaccctccgctgtttgtgcctcgaggtcacgctgataaggatccggccaacaagatggccgatccagcggcgcgtccaatgccacttggcgaagcggcactcctcgcacagggcgtcgccggaccccggttgccggccgcccagtacgctgcaccgcatgtccgaccgccttcacctccggtccggccacaaggcctcgcacaggccgagggcgttccctgggctgcgtacgagtcattctcgctcgactttgacatccgcccgctcccggccggcttgacgtttccgcccgagtctgacatccgccaaggccggctcgaggactttctcggcctcttgcggacatcggtcgaccagcttccgctaccgctgccggttgccatccacgtctttgagatccgactcgacccggcgatggccctcggcgagttccagcaagtttttgcaatcctcgctgaccggctgtacgattgcacggacgccgaggggctctcggctgccgccgcagctatcgacatcaaacgggagacgacggtgctcgaggacgcctgggaaactacgcgcttcacctgcgcgtttgcgaccgcccggcagaccgaagctgaattcgaagaggctctgtttacgccgatcttcgacacgctcgaccacctgctcgagcggctcgagccgctgtcgacaccaacgacggcgaccggcgaggccaagcttttctttcacctgcactggttcgcgctcgagctgctcgtccgtctctcgctcgtctcggccgcgctcgccagccaggtcaaagattcactgctcaaagttgccgaggtcctcgtccgccgtctgctcgagtacggcttcaaccggacaattaagtcggtcaagacggccgccacaaacgtcgcagacgacggctgcgtcggtgactacacggccgaactctgggtcggcctcatccacgtctttggccagctcgcggccgtcccgggcgccctgccgctcgaggcgacgctctcctccctcatcacggccgcctcggagagcacaaccttgccgacccagggcctgctcgccgccgagcggacctggtacctcgtccagggcttgagcgccatctctcaatttacggcggccggccgtgtttatcccctttgctcgctccccgctcagtggccgctcgtcacccaggccgtctctgctgtcaagcttgagtcggacccggtcgctgaccgcctcgcgtcatcgacggcgctcgcaaagcgcgacaagtatgtctggactgtcctgggccggtgccatctgctcgcctcgcgttggggctggaggttcgacgtccacgacaagctgctcggtctcctcagccagaaggttttcaagagcagaggcttcgtcaagctccattcggatccgacgtccgactttcccctcttcctccgagagtcggatcaggcgctcgtcgaggccatcgatcctgagggcgactcggcgttcgacgtctttctcaagctgcttcacctcgccgtgcgagactttggccggaccgcggctgacggcggcgtcccggccaagcaagccgagcgagccgtctcgcggcttctcgccatctctgcgccggtcggtcgaacgccgtttacgcgcaagacgccgccgacgctccgcgagctgtcgacgctcatcaaccgctactcgtttacgatggtcgccgtttttctcagcccgtcggccgacaacgccgctcactcgctccggctatcgcaatcgtttctcgaatttgacgccgctgacttcaagtcgcgcaaggtctgcgtccgcgccgccatgtacctcgctgtcctctaccggcattttgcgctcgacctcggcccggtcgctgactggcttggacagatggccgaatccctgctccacgagcatgcgctcgttgcccgcccggcaccgggcgccaacctaggtagtctaccgccgctgagcgagatcgtttgggccctgtcgatgatcctcggctcgattcggcacatcatcgagagccgtggcatgaccggccaggcgctgaacgcgtacccggatcctgcgctgcttcacaagtgtacgtgtgcgtcgtccggcctcttgcgccacgacaattgctcaccgcgcgctcctttgcagcctggaccgtcgggattctctcgtcatctctcgccctcgagccgatcaccggggctgaggtcctgcagtgcgtccaggctttcctcgatgcccgtcggagcgcacttacgtcagcaaccaactcgcagatggccaacatcgccggcgactcacaggacgagtttgcgttcgagtttgcgccgatggactttgacgacccctcgctccgccagctgctcggcgaggccgacgccgccgccgcgccaacgcctacgggtcctgagccggagagcgcggccgccgccatggcacgcaaggacaagacgtttgcagaaatcatcggtcacaccgtctcgccggcaatttatcggctgctcggcaacatgctctcgggcgactggctgagcatgatcggtggtgctgcagcagccggctcggtcgcgaccaaggacgacatgcaagcccgcgaggcgtacgtcgccaggctggtcgactgctgggccgggtgtgcggctgtgctcgttcagcatcggctcaaggtgcgcgctcttcctcctcggtgccagcctgaagctgacgccgctcttctgaccctcgcaggactggtcaagctacgtcgagctcggcgccgagtcgtggaagcgattcggcagtcttgtcgcccggcggcaggtcggcctccgcttcctgtggaacgtcatcagtctcgatccggccgctttctccgtgcgtgcgggttgtcgcaaccagttctgcgcaaagagctgactctcgctccgcctcttcccagtcgctccgagaagagctgctctcaatctggttccaggcagtcgtggcaccgcccacgacctggacagtcgagcccgacctcacggcgcagctcatcgaactcgacggcagccaggccggttcgctctttgccatcacgcctttcgctcgccgcgagcctgccgacgaggacgcgacggccgaggttgatctcgtcatcagcgcgaccgatctcaaggtcaagcggagcgtcctgcttgacggtgcgttgtccagcgcctcttgcggtgatttcggaccaatctgaatgttgcgcctgaccactgcttaccccctgccagaggtcttcacgtcgatctcgatcgacatgtcgcgaccggccgcgggcaacgtcgcactccagcagcgcaaggcgttcctcatttcgctcgtcagggacctgctcctgtcgatgtccgacttctacatggtgcgtctgaaacaagcactcttcctctgaccgccgactgactctcttgccctgcgttgcgcttcgtcaggcccttgagggcgacgagaagcgcgtctacgccctgtttgcgctcgacgtcgtccgctgcctgcgtgaaaagtcgggagactggctcaacgagcgtagcgtccgggagctcgcctactggtctgccgtcgccaacgggctgcgtacatcggcagcagcagtggtaagcccaccggcaggcaaccctgaggtgccaggaggcgtgatggacgtcgatggtgccgcgccggtgggagtcagcgcctgagagcgcggcttctccccgccgcctctaccatgttgtgcggctagacctgctctgctcctcgtgatggcaggctgccgacgtcgtgctttcgagtctcatcaatcgcctcacttgccggcgccctcctcctcggtctcgagcttcaagctgagggcgtgcagcccgcgggcaaactcgtccttcagcgcctcgttcacaagtcggtgccgggcgatgcgcgtcttgctgaggaagacgtcggacctggcgtagatggcaaagtctacgtgcgagggagcaggggagggtcagcactgtgggcgtggtggacttgggtgcggccggcgaagcctggaactcacgggtctcgccctgtcacgcacgcaggagagtcaagagatcagctagagcgctaccggctcaaggcatcatcagcggcggacgcaccgtgtacgctccgggctccttcattggcttgtggtgggcgtgcttcgagctgtcgttgcggacctcgagcagcgtcggctgcagcaggtcaatgagcttcacggggacgacatagggcaggtcagctcttgaatgcagcagcaccgagcgtcgagccccgctaccttggtcctgatggagtcctccattgatggtggcggaatggacgtcgtctggcgcgtcgtcgaggattggtcggcggagggcgaggcggatgccagggcgcggaaggagatagcggtcgggaaggaggttcggagagctgctgctgaggtcgatgggcggagagcagcacgcaggggcgagaggagcatgccgagaaggacgtccgggtcgaagcgacgagctgggaagatgggtgtcaggagggagaggaaggcttgcgtctgctcacctctatccacgacctcgcctcccacctatctcagcctcctcctccctcagcatggcctcctctcagacacagaccgcgacggcaatcgtctccaaccccggcgtcgacaactttgccgtctcctcgacctcgggcgtcggtaacaccgatccagtcaacgatttcgcgggcgcgaccggcggcaccgacgcctttagcgagacgcccaacgcccgcactgttgacgaggttgaccaggagggacacaagacggcgatgggtgcgtggttccctcgtcggaggtggtgcctgacgctcaggacaggctggccactgggccctagccgatgctgctgctgccgtcgctgctgcgcctcgtcggtgacgtccctccgagctgacacctgagccctccttcgcccgccctccgacggcagacaaggtcaaggatgcgctgcacctgaagaagtagcggctctctgtaccgtgtgacatgatcttgacgagctgttcggcaagtgaggggcggcatcgggtcagtgatgcgcgagggagggcttgtatgtgctagcttccttcttgactagccgcctcccttcttgacagaagcctgagctaagtggaggcgctgactactcgcacgcacgctcggatagaaaaaggaatagcaaaagagagtaggaaaggaagacaaggatgcaatgcaggaggcaaaagggatatcgccgcggggaatcgaaccccggcctagtgcaaacagccagatggcaagcaccaatgaataccacttcaccacaacgatcacacagttcaagatcaatctgcaaaatcatattctgttcgttggaggggttaagggttactacaaaatcgaatagtgtaaggcagggtcaaggacaggcgggacgcggacagagaagaacggggtagggtcgggtcggctgcctaggggtagagtggtcggaggaggggagtcgccgagagggggaagagaggcgcgagaggaagagctacggaagagggaagcgggcacacggaagcggtgggtgatggaaggcggagcggaagagacgcggaaggtagagaagccaatgagagagaaggaagatgaaacgagtggcgggcgtgcgccaccgaggctgaaccgaccgaccgaccgatatcctgaaccagacagaggccaaggccggatgatcagagtcgaccggttcgaagctgagtgccggggacaagaggctcgagaacaacacgaaacttggcgtttgatgagagggtgttgttgatgagccgcttgacctgctcgtgtcgaccgagagcgaccggagcacgacccgagcaggcctcgtcgtggccgaacggagcagcgtcgccacagtcggcgcagaagtcgagcgagccggggcagagcgtccggaagtgaagaccagaggcgacctcggcgtccgacagctcgagcaccgaccggaaggggacgacaccgagccaacgtcgaccgaggaccgtgccggactcgaagacggtgtcgcgctcgaggccgggaagtcgacgaaggacacgttcgagccgagtgttgaaggccttgtcgcaccgggcccgctgggtgacgatggccttgtctgttgaacgacacggccttgcaggggacaaggcagtcgggtgaacgcttgagatacatgaggacttgcgccttaaaaattgctatgagggaggaagccgtaagggcaagagagtgatgttacggagggaggtaaagcgtgttacgttcgatgaagcgtaaccctaacttccggcgccgccgcgcgggcgggcgctgcagcgcgccgggcgctggcgaccctcccgcaaaactaccacgacgctcttccttcaacagtaaagagccggagcaaagtcacggagccctgctgcaagctcgcgccgttcgacggtgttgaaggcgttggtgaagtcgagcgagacgaggtgggtgtaggtcttgggcaagttgtctgcaagcgcccgttcgaccgctcggaccacaggctcgacgccaccctttgacccgacaccgagctggacagggagaagcatgtccggcttcaagtagtggcgaagcaagaccttggccaccagtcggaacagaagctcgccgacagcgattggccggatgccgccatccgacttgacgagtggagtgagccgagaggcgcacaggagttggtggccgggtgcagagccttgagcgacgagaccggccaacaccgacacgaacgagaccacggccggccgacggagagcgaccgagagcaacggctgcgtccagcccgagatgccaggcgccgtgtcgagcttgaacttccggaagacctcgtcgacgatgtctgccttgggcgccatgccaggagacgggccgatgcctgcagcaaaggggcgagcgagtccgacagggtgcttgcgcttgagctcggctgagacgtccgaggtgagaggagcgaccttggccgaaccggccagcagacgagcggcccgggagagacgaccggaggtgacctgcttggcgacggcctcagagatggtagcgggaggacggacgccccggtcggcgttgaacggcatctcgggccaggcgacaacagggaaggctgcgagccgctgcttgaggtcgacgtcggctcgaaggccaggaacgaggccgaccttgggcaggcaaagaaagtcgaacagcgtctcgtccgagggcttggcgacgaaggcagaggccaggcgttcggcggcgtcggcaaagaggcgagcttgtgagccgatgaggggtttgacggccgtcggcagcttgacgagcgacatgaaccggtcgaggaggtcgtcgacaggggccgaagagtcgtcgttagagggctcgaaagtcggaggacaggccgaggtcggaggagcctttttagggttagggtttaacggggcatgcaatgggagcagagggtcagaggcgctatggacggtggtacattggaggcgagaaggagttcaagtggctaaggggcttcgcctaaaaggcgaagaagcgagcacgggcacggagcagagagagcgagaggaggcaagagaagagaccatagcggggggcgggcgcgcggcggcacaagaaggaactgagccggccgagcgtacacatcggctggctgcagcaggtgtagcgtttgcgctcaagtccataaatctacaacaggtcgcactctcggctcgctccactatggcaggtttactgcaggctcttgaggatgccctgcaggagaatcgcaacgccatgggcgccgggatcgggtacgttggcctgttcgagctgctctcgcgacacgtacgccgcccggccggctttggcgtcaatcttggccgtgtgcgctgcggcgtcgacggcggcctggacggcagcggcgagatcggccaagttagcggaaaaggcgttgacaaaggcctcgagcgggtcgacgagcgtccgggagggtgcgcgggctgacaaggtagcaagcacttctcgtcagttgcaattgccggctacaaaggaaggaagatgggcgtaccccgcgtgtactcgaaaagcgtcgccttggcggtcgcaagcgcgtcggcccaaactgcgcttgtcgccgtcttgctgctgtgcttctcggccgctgaccgcagaccagcagccaggccgttgaaaaagatggagtagagggcgcccgacgtgcctgcggaagttaaagagggccattagttggggaggccgacgtcgcgcaagtaaggctcggcgaccgaccatccatgtcgatctcgatctgctcagccagggtcaggacggccgagatgacgtccttgtcagacacgcgaccgtcgtcgatggccttcaggatacccttgccgcctgcctcaaggcaggtgccgcagtcaccgtcgccggcgatgctgtaggaaggaggtcaagtgcgagtcggtatgtgtgactcgattgcaaccgagcgagacagacgtacgtgtcgtaacgggtgatttcaggctcggccgcaatgacgtccttgcaagcctgctgaatcgcgccgatgaacgccttgccgctcgtcggctcgaccgctgcgcccgagttgttcgagtgggcctcgacgggagcagtagacttgctgctcgtcgtcttgtacggccggggctcagcccgggacgtccatgcccagccgggcgcgtcggccggggcgtcgagaagctcaaggagctcggccgacgtgtacttcgactcgccctcgcgaggaaggaggaagagcgagaccgagaaaccaggcatgttgagcgagctctgtgaggagaaaagatcgagataagcaggtgggacagataatacctgaattggggcccgtcgcaccatgtacgtgccggctagcagccggcgtattttaaggcccttggcggcgcacgtcctgcgaggagcgagagcagtaggtgagcaagattgtcgcgacacgtatgattgaacttggcacgcactcgttggcagcgccgacgatgccggccagctcgagctcggagatgccgccgaggttgttgatgaggaggacgacctcgtccttgccgtcgccctggaactggacgaagctccggtccgggtccgatgtcgaggtagcgaaagaaaccatgtgctcgagaaggtccttggtcgtcggaatcgagacacgcttgataccggcctcattatggatgccgaggccgctgtgtgggtgcgaaagggcggggccgtcagtggcggtgctgctgcgcaccgtctcctctaacgacgtacagctccatctcgtctggcttgaggccatgctcctccgaggtggagctgcccggaaggtggcagtgttcgaggccggcgccgatgctcgccgtgttctcagaaacaaagtgagcaacgtcgtagacgtcgtcgagcgaggcgccttgctcggcaagcgcgcccgcgagcttgtaagcgaggacggtcccggcgagtccacgacggccgaccactgcccagtgtgaagatgaagttcggagtcagcgtcggacgatggcgacgtcagggagcgtcccatgaggacccactcttgccttgctcgcggccgaccgcaacatcatcgccgaccgccaggagccggatggcctggcccgtctgaattgccgtctgctccttggcgagtccaaagtgcaagacgtcgccactgtagcgcatgatgacgaccagcgtgcctttgtcattggcgacggtctgaagcgccttcttgatctgaccggtgttgggcgctgcggaagaggaggccgctggtcaggcagccgatcgacatcggcctgaaggcttagggctacgtacaggcaaagacgttgccagagactgcagcagagagaagaccattgccgacgaagccggcgtgcgatggcctgttgaccggccgtggccgcagcatcagctcaggggcaggctggccaagtcactgcgcagcctcgactcactcgtgcccgccgccgccgccggagatgatggcgaccttgtccttggcaagctcagtccgatagatgactgtcgtcacaggtcgcgagtaccagcagaggccgagcgagagtcagatcgaagcgagcgagggctgagcttcgtgggtcggctcggggccgagggggctgacccttgtactcctcatcgagctcgaccttgtcattgagcgcgacgacgcccttgagcgcgtcaatcacgaggtgcttggggtcattggtgatgtgcttcttggacatgctgaagaggtatcttggagagtgaagagaggcgagtgatggtcgatggcggagggaggacttcgtccgacgcgtttcaacaagttcagcgagcggcgccggccgcccattgccgcaacctacggcaccggtccgacctgccttaagtctcgcgtcggtcataacggggttagcgaggtggcgagtgcagcctcttctagccgagagcgagcgacctgctgccgttgacatgcctgccttgtcgacaggtcgtccggccccgtcatcaccgtcatctctgcttgcgcttgcaagtccgggctgaggaagcggggactccgcgacgagctcttcttcgcctccgaccacggcgaccttgtccgacctccttgcgctcacgctcgccggctcggccgatgggcccgctccgacgggtcggacatggtcagctcctactcgacggcaggcaagcagcgcgtatggcccaccgcgcgcaagccgacggccgccgccctcaaagctcatcctgggccgcccttctggctcgcattgagcgagatgcagctgtcgagcagccagcagctgtcgacgcctgcagctgacttgctcaggtcgtcgagcgccgcctgctaattccgtacagactcttggactgactggtcttgtgccggggatcggccgagccgctagcgcctttgagctcgtggggcacacccgtcgtcggctcccggcaagcggcgtagagaagctgaccgtgccacgccgaggagcgccccaatctacctcgatcagacaagccgatatcttcttctccccgcaggtcgccatcactcttctgccttcactccctctgctcgcccgtcaaacctctccaagatggccgcgcgcgagatcatgtcctccgccctgccgacgctcgagcaagagccggctgcccctccgcctctctcctcatcgtcctccgaccgggacgaccccaaggtgctcgatgaaaagagcgtccatctcgagggccagcatgtgcccgagggcgagatgatcgaccacgctcctctggccggcgttgtgcgtgctgtccgcttcccgtccgtacctgtcgctgctaccccggttgctgaccaggtttcgcgtgaccgcaggccaaggtcgaggcgctctacaaagtctttggcattggccggggcaaactcggcgtctggtttctgtacctctcggttggcctcggctgctacatcctctcgctcgactcgtcgacgacctcgcagtaccttgtctacgcaacctcggctttcgataagcacgcactcctcggaagcatcgcggttgctgaaggtcagcctcgctctctgccgctttgccgagtgtccggagctgacctccgctcgtctctggtcgagcaggcatcctctcggcggtcgccaagccgttcattgcccgcgtcagcgacatcaccagtcggccgaccgcctacctgctttcccttgcattctacctcctcggctacatcgcacgtctctttcttcgttcttctccccttctcatcccagcaacccgacctaactcttcatctggctgccgaccgtcagatcattgcctcggctcaaaatgtcgccgctgtcgccaccggctcgctcctgatcgaagtgggcaacgcggggctcgacgtctgcggcgacatcatcgtcgccgacgtgtcaacgctcgagtggcgcggccttgccacggcgctcttgagtgccccctacctgatcaactttgccgtgtcagccgagattgccaacgccatcctcacgaaggcatcctggcgttggggcgcgtcgctgctcgtggatcaaccgtcgtatagggacggagcgctgacacccccgactcggcccgacaggctacggcatgtttgctatactcgttccggccgccctggcgccgactatcctcatcctatacattgctcaaaatcgcgccgccaagctgcacgtcctgacgatcgccgcccctccagccgcccagcgacgggccaaggctggcattgacgagcctacgccgtcctaccggcagcaggtttgggcgttctgtgtccagatcgactttgtcggcctctggctgctcgccgcggcgttcgccctcatcctcctcccgttcacgctctacaagaagcaggacgatggttgggcttctcggtcgtcggctcgcgtgtcggctcacaagctagtgtcccgcacgaggacctggccatggtcatctctctactctcgctctggacgaagctcggcggatccgtcggcacggccattgcgttaggcgccttcactctcgatacgccctcagccgctgacctgattccttactccctgacagcaccggcatctggacgaatacgatgcccgacaacctgcgcaagagcctgcccgatctgccgcaggcaaagctcgacagcatctaaggcaacatcgtctcagctcgcaaaacctaccccttcggcgaccccgtccgcgccggcatcgtcgaggcgtacggcaagacgacgcagcccacgttcatcctcgccctctgcatctcgttcgtctcgctcgccgttggcctctgggtgccggctttccatctcggccggacgcacaatgcggtcgacgagaagggtgtcgacggctcgccccttgccgacccgaagaaccacggcgacaagaagcagagctggtggatgcgcttctactgagcgctcgctcgccgcaccccctagtctccgccattctcgtgctcatctcgggcatctagatggcttcatgagatgggcttcccgtcactcttccaggacacctccgccgatgatctcgcgcagcacgggcgcgaccgtcttgcgcgttgcctcagccttcttctggctccagacctggcctcggccgccggcccagtcgactgcccaggtcgcatcgagcgacgccggcttccacacgtcaagcgagagcagctcgttggcctccagcctgggggcaaccgcctcccagagaccggcgacctcggccggagcgaggtgggccgggctgtagagcaggagttcgcgcttgcgcttgcccttcgtctccgacttgtacgacgtcaggacaccgagaagcgtcaggtcctcctggacggcataggcgtcgagcgcggcgataaacgtcggccacggtgtcgccggtgtctcgcgcgaaaggatccccttgagcgcgaccgggatcgaggcgagcccgagccggacctcggcggccaactgaaagtagggtgatgggatcgcatacgccttgtagtcgcgcgcgagcaggtcgggcagcgagaggtgagagacgttgttcttgacctcgttgagctcgtcggcgagcaccttgaggttcggcggcgctgttcggtcggcagccgagatgctggcaaccgccggcgacgactcgctctttgaagccatgcccgttaacggccagaggaactcgatcgccgtccagtcgatgtcgttggccttgcctccggccttgagaccgtttgagtcgatcaggatggccgacaaaagaaggcgcgcaacctcagtcggcaggagggactggccgcccagcccagtcgcaccgaccggcagacgcgaggcccagtgcgaggcgacgatggaagcgcacgatgaggccgacgtatcgatgatgcgaggcgacgctgcagcgtgcgcaccgtcgtcggcgtggtggtcgaggatggcgacgacggcagcctcgacggcggcggcctcacttgcaccgccgtgtgtccggaagggcccgagcagggagttgtggtcgacgagcgcaaacttgacgccgcgcgcgaggagtgactcggtcgggaccggtaggtcgtcgatacagagaaggacgtgctcgaggctgtcgagcgtctcctgcccggcgtctggccgcgtcaggcggagggcgagctcgttctcgggccggagccggagggccgcccgcggcgtcaggatgagcgggagggcccgaacgccctcgatagtgttgagcaggtaggcgtgggcgagcgccgaagccatcgagtcgaggtcgccggcctcgttgcccatgacgacgacccagccgggctcggtcgagccgccggtgagcgaggtgaggaactcctctcggagcgaggtctgagcatcccagaagaggcttccggtcgacttgtcggccggtgcgacaggagcggcggcagtcatgtcggaggaaggtcggctaggctttgaatccggcgaggcgataggggcgaccgttggtcggcgggtcgtcgaggtcgaggtgtgcggtcggctctgggcggcgagcttgacttcggctccggtgacggcgagcttgggcggagcgaggggcgagcagacgcgctggaggagagggctaatagccgttgcgttctttggacaaagtgtccgttgcatgaaggttgacgagctggtcggtcgagcggaggcgtcagcacgtgcagcttcgaccgcgcccgtcgcgccgcgccaggcgcacgaggaggacgaacaggctggcagagtaaaagccgacgagggcgagcgaggcgaggacgagcgtgagggcagcgatcgaccgtcttgctggcatgtacggactccgctgggtgtgatcaggaatgtgtttgagggcggtctgagccaggagattcgtggtcgacgtcgaggcggtgcgaccgacttgccggcacctccgcccgtcaccaccatcgcgcccctctcttgactccctcgtcccacatcgcattctccgcccttatcaccattcacgccttctggatccccaagatggcaggcccaatccggtcctcggccggcaagaatgtcgcaaaagcactcgccgccggacccgccgcctcacctgcgcgcccgagccaggccacaagcggcggggcgtcatcctcgtcgtcggctggcaagaagctcgtccagggcacgctgacggcctcgctcggcctcaagagggagccgccacctttcatcccgcctaagtccaaaagcaagaccgccagctcgagctcaaaggcggacgaggctgaggcaggcccgagctcgaccggcctcgccccgatcgagccgactggccccgtgtcggacgagacgacggcgaccttccaccagtacttcccgaagctcggcgacgacaagctgccgctcctcgagctcgagctcgaaacgatgggccatgactggctcgaggttctcagccgtgacatggccaagccgacgttcctcgaggtgcgcgccccttccgatcgtggctcccatggcgcgacgcgccgaacgtcaggcgcgtcactccttcaccaggcgctgacctccctcgaccgatcttcaacccttcagctcaagcgcttcatcatcaacgaacagcgcaagaagaaggtctaccctccgcgtgcgtcgcttcgatcgacctcctgacatggaagccgagctgagcgacggcgctcgatctgcagccgaggacatttactcgttcacgcggctttcgaagctgcaggacatcaaggtcatcgtcattgggcaggagtgagtccttgcatgcttcgccggtcgtttccggccattgctgacatgcagcgttcggcagcccgtaccaccagcgtccgtccgtgctcgacccgcgcgatgcatcgtcgcctcatgctgacagcccttccactcgaccactccagccggacaggcccatggcctctctttctcggtccggcgcggcgttcaggttcctccatcgctccgcaacatctacaaggagatcgcgagcgagtatcccgacttcaggcctccgacgcacgggtaagttggtctgctgcgcaatccttttttcgcgcatcgcttcgccgacctgaccgtcggcattcattcctgtgcagcgacctgacgtcgtgggccgagcagggtgtcctcctccttaacacgagcctgaccgtccgcgacagcgatgtacgtcgccggccggagaaagcgccaaagagcgagcctctgatccctctcctgtgctttctaggccgcatcgcactcaaaggccggatgggtgcccttcacgcaatcgatcatctcgcacctcgccaacgacgcttcgtgcggcgacaagggcaaggtcttcttctgctggggcaagcatgccgagaagatgctcgactcggcgcgcgtcgacagcgtgggtgtcctttatcaccctcttgtatcgcttcaggctctgacttagacgctctcttggccaccccggtctgcagaagcggcaccttgtcctccgctcggctcacccgtcgccgctcagcgccgcgcgcggcttctttggcaccggccacttccgcgagggtccgtcctttgcgctgctagtccggcctcacagaagcagacgactgacgacgctcttcgtttgcagccgacgagttcatcaagagggagtggaagaccgactccggcatcgactggtcgagcatctgctcaaagtgaggcgcgtacgagggcggccaggccgagacgccagacgagactgtcgcgagcctctgcgactgttgtaccgcaattcatgttccatcttgtgtcattcttctactgctgtcgtccgggaagaatgatcgagacgatgtgccggccgccctatgcgtcgtccccggctcggctcgcccgacggccggccgaaaggcgagaccgccacgccaaaagcgccttccctcgctcatccaccatcactaagcctcttctgcctgcctactggccctcctcgtagccaatcttgcgttagaaacagtcagctagacctcgcatccgacaaccaagctccccgtcatggccacagaaggaacggctgtcccaaaggacgcccccgtgccggcgacgaccaagcagccgtccggctttggcgtctcgcacacgatcctcgtcgccatcgccaattttgcgatcgagtcgttctttaaggagatcaagattgtcggcgaggagaatgtcccgctcgagggcggcgtcatcttgtgcgtgcagctgtcgtcgcggaagaaggataagggcgagagctggggctgacctcgaaatgaacgcttcctcggctgacgatctcgtcctcagcgcttgctcgcactcgaacatgggtgcgcggtaccatctgactgcccgcctggctggcggctcctttactgacctatcctgccgacccgtcgcacactgtcgccctgcagctgtcgtgagtcagataatacttcctcgagctcgcccggcgccgaccggccttgcctccggatgaacaagagccgcactgacgccgaactctatcgcatcacaggacccggcctgcctctcctacggcgtcatcgcaacgaccaagagcgtctcgaagcgcttcatccactactgggtgcgttcgctagggaaggctgcattcagtccggttacgcgcggcgctgacgcccaggcttctctcgtctactgatcccggggggtggtgcttgcctcaggtcaaggactcgctcttcaagaacccgatcgctggagcgatcctgctcaacgcaggcaacatcccggtcgatcgcaagaccaagaacaaccagatcctgtttcgcgggacgtttgagggtgcgcgcgcatgcccctgggcggcagcctgtcgtccgcgcagccggctgacctcggatccggccctgcagcgctcgtcaagggcgaggtcgtcggcgtctttcccgagggcacgtcgcacaaccactcaaagatgatgccgatcaaggacggcgtcgcttggacggcgctcgagtacctctcgtacctcgacgagcaccacggcggtgcagacgtcggaggcaagggtcagggccagaagccagccgtcgtcgtccccgtcggcctgacttactcggacaagaccaagtatcgcagtcgcgttgcgattgagtgcgtctcttgtcacactggcaggtcgagccagcgaagacgctgactcctttgcaccctcgcgccgtctgcaggttcggcaagccgatcacgatggacgagtttgccggcgagttcacgtctggcgaggagggcgcgcccaagagcgccgtcaagcgcctgacaaagcgcgtggaggacgacatgcggcggttgaccatcaactcgccggagtggtacgtcctcttcgcttcagcacggccggaacgagattgagcaagttctgacggcttcgtctcctaatcagggactcgctcaacgctgccaacatggccgtacaattgctctgggctgacgagaaagagctcaggatggagcactatcgcgaggtcgtccagacgtgagccccatagcgttcacttgcaccgtgtcgatggtgcgctgacgcgcgcgccttttcttacagcttcgtcgacctcttcaccgacccggatccgttctcgccgctgttcagcctcaaacaggcgcttgtttcgtaccacacctacctcacgaacgctcgcatggacaactcgtcgctgtcgcagatcccactgccggccgacctggacccgtcacggccgatcccgctgccgacgcggttcagcacgctcgccatcctcatccgcgacgtcctctcgaccctcatccggatccccttctttgcactgcccttcctcgtcaacattccggtctacgtcatggcccgctggggcgcaaagctcgtcgatgacgagcaggagacgcaggcccagatgaaggtcatgtttggcctgctcgtcagcgctctcgtctacccggccgcagccgccatcatctacggcctcgccttccgtgccggtagttacgtcggtgccttaatcggcctcgccgtcaccgccctcttcgtctggggccttggcatcagccatcgctcgttgatcgacgagaactacgagaggtgcgtcgtcgcagcgctatgctttgcacctttaccgaatgacggctgacttgagcttttccgcatcttctgcagtggcaagaagcttgtcaccgcgttccggatcctcctcggcctctggtcgccgaactcgctcgacattacgctgccaacgcccaagctctcgcgcgctaactcgacggccggctcagcagacgtcgccaagcaggaggccatcaactatgatgcgccactgtctcccggagcaagtcacctcccgccgccatacgagcccaaccagcccaagatcccctcgcggcggctcatccgccaggtccttcgcaaccggctgcgagcgtccaagggcctcgtcgcctacgtcctcagcctcgagtcgagcgacgagctcttcccggcttcaccttcgctggcgacgacaagcaagccctcacggtcgacactcgaggtctcgagcgcgggcgccgagccccagggctaccggacgggcaagcaaatctttgagttcctccgtctccgcggcgcccgcctccggggcgtgccggtcgacctccactggctcgaagaggagagtggccggccgacaaacggggagcagaagaaggaccgttgaaagtctcgctgtcgaaagatgccctttgtcccgctctccatcgtcgggcatctcgagagcagagcatcatcaactaatcgcgcggcggcagggtgtacacttgccgctcaggccggtctcgtctcggcgtcgctccatactccctcatgatgtggagcatgaatgcggtgtcttgcagtcgctcgtcgatgaacgtctggcgcgcctgcgacgtgcgccgcccgttcggccgacgcctgtgcttcagatgcgcagcctgcaaagcgcgtacctctaagcggagcccgacgtacgagctgaaatcccagccggtgtacttcctatgccccatccccgccctttcatcagaactttcatcagaaagtcgtagacgcactgcttgtccgaaaaatgggcggtgaccgggtctaggtgcggcagtaagggcgagtcggggtagagcatctgcagttcgaggtagacggaatgcggcgccggcttggccacaggcgggagaccgcgccgacgatctgctcccgaggtttgtgatcagtccaccgggtagcggaaggaaggggagagaaaactcgacggagggctacgcactgatcatcttatgcgctccttgggccagtcaccgctcctcggaagctgcctgacggacagccagacgcgcggccttttcctcttcagtctctggtgtggcggtaaggaggtgatgcccatcgcgagcatctctgcccgatttgccgcgatcctgcgttctggcagacgggcgacggtcgaggcttgtcagaaaggccgttcggaagagcctacaggtctcatccggcaagatgcttgtacctcattccagcatgtgagatttgtggtcatccaggttggtagcaggagccctgctcgtcagagacgggtccgaggaacacagccagcaccgcagccgcatcgttctcactgttgtcggagacgtccgcatgctcactcccgagtttggttcgttttttgcggtcgggaacgacgatatgtcagtccgggacgcaccgaagtactttgagacaaggaggctgtacgacagccaagtattcagctgttcatctgccgacgagctgagctcgtcttcgctccccgcggcctgcgccgctcgtcgcctagcttgaactgcagcggcggaaagcctgggtctcctcgtcgagcctgacctaagcgatggcatgatcgtccagcggcgaacgacaggaaagaccgagtgcagcgatcaagtcgtcggagcggcgatgagagcgggagaggttcggctgtaaaggcgagcaggcgggcgcagcggcgtcatcccagggcttctcttgtgaggtccttcttcctccgcatcagccgcttgcggtcctagctacttcatgcgagcggttgactaacctttagaaggaagaaggaggcggcaggtcgaggtgactgtaccgagcttgcgagctcgcgtcgacgaggcgcgtcgccggcgcgcggcgagctcggccggcgccacgagaggccggccatccgacctcggcacgtcttcctttcgccatccttcaacgtgccatagattcaaggctacaaattagctagggagttcctgtctgtgcactggaagtgcctgaacgaccgaacaggggcccggacggatggcggtcggacggatttgagactccgacacgccgaggaaaggggctcaagcgtttcggccgacgccgcgggaagggggcgggcgaagagcgagcgcgagagagaggcaacggcggccggactgcgatctgcccgtcgctcgacagccacctctgcttctctcccgtcgaccacccaatcactctagctgcggtcttccaggtctccctaccatccagcagacacgtcgccggctttaccttgagcgtcggcagagacgtcccctttgccaggccgcccgcccctccgaccgacccgaagcgccggcccgcaccacacaacgctcagcgcatggcgtccaccaggagctatcaaggtctcgaccatccgtgcgcccgccctccgctgtcgctcctgctatttctccgatagctgacgttctcatctcctccgcctgcgctctcgctggattggctttggcggtcataggacctcgtctctccgcggcgaggaacccgacgtcaagcagcacctctcgccgcagcctgacggcttccggggtcggtcatcaacctcggactcacttgcggccagtcccggccggcattcgaagcgcaaaggggaggatgggcccgacggaaggtgagcctctcactctcgacccggctcgtggagctgtcacccggctgtcgccgttgcgacgacgacgtcgtcgtcctttgctgaacccaatcatccttttatccttaccaaaaggtcgacttcgggctcgccctcgatcagcctgcggacaaccgacgtgactgaagcgaccgaatcagccaagcgggcccgcctgggcgaccgtcagccgtcgggctcgcctgctcccgtcctcaaggccctcacgtcggcttcgacgtcgctcacggcagcgccttcgcctaacggtccggcttcggctgacgtaccgcctgtctcgcccgtcgtgcttggcttccagctgtcgaatgtcgatgcaacgacgagagacacggtccggtcggcgctcgggatcaaggagcagcagcaggcgctcatcctccagcgccgacgcgaggagcagcgtctggccgccgccaaagagggtgccaatgatggcgaatcaggcaccgatcactcggacaacagcagtagcgatgaggctagcggcaagcgggcggccgggaaggctgccgccggccccagcagcaggatgactgggccgtcggatggcgcgccgagagtgcgtcaaccgtctacgactctttgacgcgcgattttactgacgtcgaatcaattctgcagcaaactgctcccttctcatcgcaggcaccttccaactttccatcgacctcgcgtcaaggctcggcttcgaccacgccgtatccgcagtcgaactacgccgcgccgctttcgactgcgtcgcccgcccattacccgctcgcccgttcgacttcggcgtctggtggtcccatcggctctcggccgtctagcacgaatgcttacggccagcgaccgtcggcctcagcgcttcccaactacggacctgcgaacggccacgcgatggcttcagtgtcgagcccgggataccagcaacaccccttcgtccaacaggccgttggcgtcgcgccctcgcgtggaatccatcctcagccgtacccggccgcaccgacgccgccgagcccgacgagcgcccacaaggcgacctttctcgcgccgtttgagaaattctacgacgccctgcttgactcgcgcacgctccagagctcgcaggttgcgctcgagcacaagacgcaggacctccatcgccaggcggccggcctggtccacgcgctcgaggagcaccaccgccgggcggcgagtgttctcggcacgctccaggcaagcagccagagcctccaagagatggtccgggccgaggttgccgtcgtccgggatgagggccgacgcgagatggcggccgttctccagcgggttgaggagctcgaggccaagctagaggaggcccggctaaaggcgattgcgacggacgaccacgacgtcacgggcgtgcccaagacggaggcggttgtgtcagacgccgacctcgtcacgcttgcgtcggaggcggccgaggtcgacggaaggaccgacagcgaggtcggcgatgacaagccgctcgccgctgctgtggtcgggacgaagcgagggggtcgggcgccgccgctgccgccaccaccagcgaggaagccgtcgtctggcacctcgtcgaacaagggccgccctggctcgaagcgatgaggtattggccacttcgcttgcaccgcctcgtcgatccatcgaggtcgacctgcgcgactccttcggatttgtctctcttatttagagccctcctttgtctctctcgccaactctatccggcacccgactcatatcaatggcggtcaacttgtgctcgcgttgcactcatcccgcggcctctttagcccctccggcagccggcgctggtcgttagagtcatacatcggagcccgcacctatgcgcgcgagctcttgagcgacgggtcctcaaaaaggcgtttacaatttgtgcatacgtagaagagggtcattcgcgtctgatcagaatggcagagcgagggtgagcagagccgaagtcagcgcgcagagtctggagcgacttctggcgacgcgagctgcggcccgacagggacgtacttcgaaccgcttcgactggtcctggtagaatacggcttcgtcttggccgcaatgcgggcaggagatcgacgaccgtggcagggtcggatccgtgtcgaggtcttgcgtctctcccggctgttccctgcgggcggaagaagatggatgcaaggtcagcccacacccccagcagccttaacccgaaagccgctgcagcggatgacgacacactttgagatggtgagcaggtcgttccggtaaacgagaccggccgtcgcgtcctcctcgtagtcgcagttgcggcacgcccggagcagaatcttgcggtggatgtcggcctgcccgaacccacgagacagagtcagcggtctattcgcaagcatgagcgtcgcgaatagatagccagatgaaaggggaatgtaccttcgggtacagcaggttgttgctggatggtgacaaggcgaggtcggccgacgaccggacggcaagccggtcagtgagctcctcctacaagcctgaagccgcttggtcgctaccctagctccagcaccgcccggcacaggacgcaccactcttggcagtacttgtacgtgctcgagttctttgcccgggctgacatgacggaaagctaaacgaggtaaggggggtcggggcttggttcgggcaagcagatgaggtcggccgcgcgggctgtcggaagagaacgctgctgggcgtttgccagaggtgagaagcggttgacggtgaggctggctcgcttggctggtggctagaatgcttttgaaggcttcggagacgtgctgggagccgtaggaggtcgtgaacgggtcggatgggtcgaaagtagggtgaaggtgaggtgcaagccaacgggcggccgagcaggctcctccttcacctcttgaacgctgacctcgacccggcttccctgtcagctcaagtctctcaacccaagcaggccgacgatggcaagtcaagctgatctgcttcccgtcctgggcgtcccgacgagccatctcatccctctgggcgtgctcgcctcgtacttggtcatcgtcgtcgtcctgctcaagctcgcgctcgacgcggtcgatgaaggcactcccgccccgacgtcgctgccagatgcgacccgccgtcggacccgctggtccacaatcttcaagctgatcgctgccggcagtctgcttcatacctggactcgtgagtgacggacaggtgccgaggccaagcgcgaaacgctgacccgctatcggattctccgacccccgcccgcagacatgctgcgctacatggcctggagctgtggcaacttcgctcagtccgccgtcgtcgagccatcaatgagcacgctgcacacagtaggcacgtggcttctagaaacgtcgcttttcgaagaggcttgggcgatcgtccttcggcccggcacctctgcctggatctcaggtgcgcaggtgcactccccgaccttgcggagcgaaatactactgaccagccgcctgactgacagaacacatcacgacctacaccatatcttactgggtccttctgctctgggtctacactcgtccggcgggctcggcgggctccgtgtcgcgcggctggagcagcgcccaggctgctctcttcctcctcctcggccagctcgtcgccatctcggttgcctcagcgctcttctttgccggctgcgctcagcgcagcatcagccaggtcgacaacactaagcttcgcgttccgctggccgtctgggcctcgctgctcttcagcgcttcgctcagcgcgctcgtgccattgacgcaggatcgtgagtctctcccctttccagcctagctgacaatcgaacgaagctgacagcgtctcccgaactcgcagaaccgaccttcctgccgaatctgctcctctttcacctcgtcctcttcgtgcccttcctgcccctcgcgcagcgaccctcgctctcgctctcggttcgcacaacctctctcctgctctgcgtcccactcgtaccggcgctcctcttacatgcgccgccatcggcttcttccatttgggcggcctactgggacggcaacgacgcgctccgttcgatcggcgccgacgcgctctgggtgctcgttggtgtcggcgcctgggcgattcatcggggccgcagtctgctcggccttgcgttcggttcagttgtctactggctgactgggagtcccctcggcttcggcctgagcatctgaatgatcagtctcctgtgcatgtgccctgcgagggtggggcgcggcgcgctggttgtgctctctcgcagcagggccgagaggcgaggaccatcgttcgcgacaagaacagcaggggcctgtcagcgacgagcttacttggtccaaagaagagcgtcgagcaggtgcagcgccaaggctgtgagtgcgggcggaagaatgcgcgcacgtacggacgactggcggacgagacgatgctgcgcgcagccggccttgttgcctcgacccctcaaccgccaccacaagtcgtcctcacctgatctaaagcgactcgctcgatttgttcccgatcttccagctctcaattcatacctctgcaacacactctaccgtttgcgatggcctggcggtgctcagggcggaccaatgccgaggtgcgtgaccgagcccctcgctcagctctgccggccgtgactgcgagatggcgggccgcgacggctcgacgagcttgctcgagagcgggtccgggtcgggtgctgaactccagtcctgaatcctcgtcttcctttgcagctgattgcgaatctccaggcgaagagcctgatccggtcggcgcgggtggccgacgcgatgtgccgggtcgaccgcaagcactacgtcccggcccacgagcctccctatcaggactcgccgcagtgcgtcctgacggcgcttctgcgcctggaaagggactgactcaaatctttcgcaggcccatcggtcacggggccacgatttcggcgccgcacatgttcgctcgaagccgcatcctcgctcattgagtgatggtctcactgacgagacgactgtgcgcgcattcggcaggcacgctgaagcaatcgagcacctcgccgacctcatctcgaaaaatgggcggatcttagatgtcggcagtggctccggctttctgcttgccgtcttctgggagatgtgccagtcgggcgcgcctgacggccggcagatgggcccgcgcgtcgtcggcattgaccacgtccaaggtaagtcgcggctactataacaaggtgctccctcaccaaggctgacattacttcgaaatgctgtagcgttgagcgatatggccgcccggaatcttgtcgctgatggccgagcgaacgcactcaaaacgggcgagattaagatcgtgacaggcgacggtcgtctcggtcagggcggaacaccctttcgctttgaaagaaaagccattgctaacgcttgcctgactgcacaggctacccccagggaggtgcgtgccgacgtttcccggaagtgagcgatacttgcttgacgcgtggccggtcgctcgaccactcttctcctaggcccatacgatgtcatccacgtcggcgcagctgctccgaagatgcctcaggctctgattgaccagctcgccacgccaggtcggatgttcatcccggtcggcacattcagccagggtcattgcaactccttgcactctgctcgcccttcgtcgctgaaacgtaacccttgctcccttagcgatcatccaggtcgacaaggacgctaagggcaacgtcaccgaacgcaagatcatgggcgtccgggtagatctcgttcctttgactgctgcggccctacagagcccacgctgatcatcgggccgccactgcttgcccagtacatcccgctttgcgaccgcgacgatcaaactgcctccttctgaagacacagctgcctgcaccattcacgttcacgacggtttccttcgccctgcttgtagtacctcctgatgacgaacgacttctcgcaatcagcttgacgagtcgaaggagcaaaacgcatccgagaagcagaaacgagggcgagccataaggcgaaggcaaaggagagggaaaggagcagcaacaccgtggcgaggcagacaggaaggaggcgggcgaagagaggagcagagaagcggagaggaggtcgtgcaggtcgtcgtagaacgggggtcgtgggggttaggcaaagcagggcagaggcaatggggatgagtgagaaggtaagatgatgtgagcgggggcggcccgaggacagataaaggagcacaagaagccagcagcgaaggctgggtgttgaaggcgaacgcctgcgccaggcgaaagcgacgtgtaccggctacgcgcgcaggccacgaccgacgctgcccccgagccccggcgcgccgccgagtccacgaccgcgcttcacggtaccggtaatagacgagggttggacgaccgtcatcttgcgcggcggcgaggtgtagaccgtgagcgtgcgtggccgggccgggccaagaggggtgggcttcgacgtcggctgcgcagcagtagcggcggcgtcgccagacgaggggtcgacgaagatgtcgggacccttcttggcgggaccgctcgtgagcacaatgggaggaggcgtctgcagataaggggaataacatttctggtcagcgtgcccaaggcgcagattgaggtgatgatggtgttgacgcacaatcttacggaagccctcgggctcaattcctgggcactcgaactcctggctgacgtcccggagcgcctcgcgcgcgaccttgcggccgatgccgagcccggtggccggcttcttgctcttaagtccaagcgcggacggtgtcgcgagacgaagcggctcgttctccttggccggcatggccttgtcgagcaggatgcgcgtcggcgctttcgcacgcgcgttgccgagtgcggccgcccgccgaggtcgcgaaggcgaggtctggagcgagagcttcgagcaggcggccgtgagcggggacgatgccgcgtacgtcggagggtcgacgtagaccgggaagagggttcgagtctgccagtgtcgagcaaagattgtgatcagcacgcggttcacgtcgaaagggcgaattggcccgccgccgctcgtcaggcggcagggagcgggccaaggtggaagaacgcgtaccggagccatggccgagaggagcttcaggaggcgagacgtgcgataggacggacacagagcgagctgcgtcaaggactttcgtggagcgaggcagtccagagcgaggcagtccagagcgaggcagtccagagcgaggccggcgttggacagaggagacgcgagtacgggcctggccgagcaagcaggagagcgagcaagagcgggcggacaccaagtcgcaagcggccggcgtgagctgggtcgcgggtcggccttggcaacgagaggcgagcgtagaggaggactgcctgaccgagtgagatctgctgctgggaggacgatggtgggctggaggggtaggataaagtgcaggaggcgacggggcaggcagaggaagacgcgggcccttcacgcgtgcgccgacccggtgcaccaccgtgagttctgtaaaccgccaggtgcacctcgggtcgctccttcaaagacgaaattgacgagtgtcaggcgcatgagaagctcccagagcagcatcgatctgcgcgatgaggacggggtgcgagatggtggccttggtgggcggctctctgcgcaaggctcgacggcagacgacaacacaacaaatgagatcttcaacgcggacagtaggagtcggagatacgagaataagcgtaggctacgagcagtgccgatcattcgccgccaaagtcgtcgcctcctccaaagtcatcgccgcctcctccgtcgtcgtagccgtcctgcgaacgaagaaccgcgagacgggcttcagtacttcagacgagaacagggcgacaagggcgaggcagacgcacctggtaggcgtcgttctgaccgtctgatatagcgttgccaatcatcatcctagtttacagagagggaggtcaggtcagctggcaggtcaacgggacccggttggggtggcgtgagcgcgtgcgcggacgtgccctcccagcataccggctccagcgccgagtgccataccgcccatgcccataccgcctcctgaaatggaacgctcaaagagggcgtcagtcaccgtcaaaagaacgagcgcaaagctagacgaacgcaccttgacggcgaccgccgcccatcataccgccgcctcccatcatgccctgttgcggatacatgccctgctgctggtacattccttgctgcgggtacatcccctgctggggatacccctgttgagggtacatgccctgctgtgggtactgctgctggtgacctcccatcatgccgccggcgccgcccataccgctcttcttgccaagcaggctgccgaggaagccgcccttcttcttcggctcctcgtaccgcggctgctgttgctgaggcggaggctgctgctggtaggagttggcccgggcctggtcggcctcgtagtcgtgcgtcgacgacgagttgtacgacgccttttcgtcgcgcggcggcggggcgccaggcggaggggcgtacgcctgagccttaggctcaatttcgagcgggctgagacgggaagcaagatagatccgtcagtcacaaagtcacaacagtgcagggctagcgctcgcttggccgagcagctcggaggccggcagcttgcaagcgagggtagcagtcgaaggcacgcactggacccaggagctctccggcgggctcgcgcgagtattgacgtagaagtttgtcgagtactgctcgttccactgctttatccagccgtcgggtaagggccggttatcgtcgctcatggtgcctatgggagggaggcagtagtggagggaggcaggtaatggtggtgaatggcgccgggtcggaaaggtggaggcatgaggacggagacgaagacggtcagcagcggctcgggcgggcctgtctcttttcaacaggccctcggacaacagccgacggatgcttacgttcgtgttcctggatgctttcgtgttgagtaaaggagggtcgaggaaggttgatgcgatgttgggcgtagccgggccgaagctcggagggacgccggcatctgacgtcgttctgtggggccaaggcagcgcagcaggccgccccgcgacacattaaccgtgatccctctggcccacttttgtggtcgactgaccctgaacgaactgcctcactcgagccagtctgttgggagttgaggctcgcgccgaatgcaccgccaatgacaggttgcagcgtgacatcagagatttggaaacaacggtcgagtgcaggacaaaaggtaaggaggacagcgatgtgtggcagggggtctagaacaattggcgagcttgtgaagccaggtccctgcgagggagacgagaacaaaaacgaaaaaagatcaagcaaagggaggagatgtgagaggagtgaccggaagaagggatcaaaggagagagtggcccgtcagggacctactcgagtaggcttttgacgcgggcgccggcgccgccggcagcgctcgaccgccggatcgggtcgccgataatttggtacctgcggtagagcgcgagcgacgaggtcagtcgagacgacgatggcggactcaggtatcgagtacgcacgaccaagccagcttcgagtcgatccagagctgtcggatgagtctctcgtcagcctgcgagccgcatctgaagacgagcgcccagccttacctcaaagtcgacgcggggctttgcaggatcgcgcgtgtcaacctcgagccgaccccacttgacgttgccgtcgggcatgtactgtaaagggccaggtagggtcagcgatcgcacgtcagaagcgcgcctagcagacacggaccttgagcaggacctcctctggctcgcccttgacttgcgtcttgccggcagggccatcctcgacattgatgccgcccgtctcagactcgccagcgatgagcggaaggtagcgcgtccggtcggccttgagcgtccacgtgtaagggacggtaaactgcgagagcggcgaggtcgagaattcgtagaccttgccccggagctggacggcggcaaactcgtgccggtcgcccgagaggaagatcacgttcggaacgttgtcaatgatggccatcagctcgtcgcgctcgtgcaggtacgacgcccaggtgtcgaggtggccgtcgggcgggccccagagtgacgtaaaggggacggagctcaggatgaacttgaacgtcgccgtctcattcatctgcgacgaacaatcagagacgaggtcagtcgagcaagatgggacggtttgacgactgctgccgacggacctcgtgcagccaggcgatcaagtcggccttctgctcgtgcccgagcatcgtcttgttttcgtcgtctgcgagccattcgttcgaccggtgcgggcgggtatccatcgcaaagacagagacatctccgtagctgaaggcaaggcaggccggtcagttagcagtttgctcgactggagctgagaaggacgacgcactcgaagtcgtctgcggtccataagaaagggagggtcagcatcggggcgcagaagggaaggtgagcggccggcgacgcacaccacagctttccgtcgcggccatcgtgagggttgccggcgccgagatagatctcaaacgcgctgctggcctctttgaaaccctcaaagtcctcggcgtggccctcaccggcgaactacatgaagagaaagaactcgtcagataggaacgcagacgggcagcaaaccaaacctcagcgcacattattgtagatctcgtggtcgtcccagaccgcgacagcagctgggagagagtgaagcgtcaggtggcagctaagctgaggcatcagcggcgccaggacgcacgaagttcagcgaggacccgctggaagtgctcgttgcggtagagctgacggtagagccggcggaaccagctgtcagtcttgccgccgacgggcgtatctgtggatcgagccgctttgtcaggactggaagccggtaacaacggacgttacgagactaacctgcgtagacctggtcgcccaagagggtgataaaagcgggcttcatttgctgctcggcaagccatttgctcagctgctcgaaaccggggatcgcaaggcgcgacttgctggaaaagtcggcaagcaagcgcggcggcgcgtacgggtagttctgcgagcgaggacgaggggcggacgatcagaaagggttcacaggctgaagcggtgagactgatgcgcaccggcttgatgcagctcgtcgagaggaacgagaagtgagagcctgtcgaccgggcgagcactgggtcgggcgccgtcgtgaaggtgccctcgacaccgatggcagggatgacgtagtggtaagcgacgccgggcgacaggtggtcgagcgtgatcgtcttgacgtaatcgtcgacagccttcgtcacgaacgaggccgaataggtcggatcggcctcggcgagcgacacgggctggaacgcgacctggacggggtcagacgtcggcttcgtcgaaggcacccggatcgtgagcttggccatgtcgggaccgacggcgccgaccctgtttagtcgtggattagtcagtctgtgagcttgagagctttgcagagagataaatggaaacctaccgtgcaaaggtcaggtcttctgaggcaaagaagtacgagggctgatagagtcggaaatgcacgggtcaggacgcagtggtaaggcctggccagcgacagatcgcaccgtgtagagcaggtcgagcgaccagcagagcagcagagtgttgacgaggagcgggagcaggttgagcctggccgagcgggtcgggagagagatgagcgcacgcatgagcggtcgggcagactgcggagcacgacgcagaggcacgtgtagaaggacgaaagtgatcagtcaaggcctctcatcggagaagctagaggtcgcgcaagggttgaccttgaagagcgacgtcttcgcggccgtccggctcgagctcgagtggccgttaactgccgctgccttcggagaggccagagcgccgtcggagttcgtcgacctggctgactcaagctgcatgcccaagccagaccgcttgacaccctcgaccgagacggtgacctgaaggaagggcggcattaaacgtcagctctcaagggctagatgccctcatcgcgcctgtggctggtccagagaggtggcgtcgacgcaccttgctgccgttgctgcgctggacgccgctcgagcctgcgcgccctgacttggtccgccgagccgaccggacgcgctcgagctccgacatcgcaaagagtccgagataggcaaggtagagcgccggaaggaccttggcgcccgcccgggcagggatctgaggcggacgagaggtcagccgatggtgggaggggcccgggcgactgacttgccgtcgagctcggagcaaccgaccaacagcatggcggacatacgatgcggaggaagacccagctgaagagctggtataggagcgaggtcgcgcactggactgcgttgagcgccgtcatctttgcgctggcgaggggcaagaggaggaggtcgatgttggcaggcagcggcgacgagggcagccgaagcagcgcgaagcctgaaggcaggcgtcatggggtccgggcgcagcaggcagctcggccgtccttgcccactcaaaacccgtcctcctgggcggaatacatcaagacaggatcggaccatcatgctgctttcagtaatatccccagtcggccctcctgggagttgcttgcgggaggaagagatgaaggggacgcgactcgaacgaccgggcaggcgcgtcgcgccgtcgacggcgggagccgactgagcgacgcagcagccgccagctcgtcctcgactccttcctcctcctcgacccaaactcacaagctaggacgcggacccagcacaaccctctcacaggcagccagggatcatgaacggcctcggctccaagtcggacgcgtacggctttgcaggcccctcgcgcgtctcgcagcgattaacagcaccttcgatttcgtcgccctgttcgtcccgccgttgtcgtcgctacggccgtttgtcaaaggctcgtcttcgccacgcatgctgacgctacatgtgcgttatattgctccttggcagtcacctactcgccgacaatctcgaccggcgcgtcgtcgcacaactcgttgccgcatgcgttcgcgagccctcagccgtcgtcgctgctctcgaacgtccttcggtcgatcttgccatcccagcggcgcggccgggcactgactcgaggtcggctcggcgtcccgcgaaagcggactgtcggtctcgtcgcccttgtgctcggtctcgccttctggctggcgacgcgtgtctgggagctccagctcgagcttgccctctaccgcaaggagtgggtgcgaagcgatttgctcgacctcgaccaacccgaggtcgacctcgtcggctcgtgcttcccgccctcggtcggcggccgatcttactcgaccggtgcggctgggcttcagtcgacactcgcattgacgcaccctggtgactgcttcgcgttcgcttcgctcctccgtcaaggcccgcagcacgccgccgacgcaacgccgaccgtctttcacacgtactggcgagcggatcttgcggcctttggcgagcgccaggcgctcatggtcaagtcgttcctcgccacccagtcactcgaacacagccagctcgtcctctggacgacgggcacgctcaactcgtccttgcttgacgagctcgtgcgcgaccacccgaagcacgtcgaggtccgcatcgtcgactatgacgtcctagcccgaggcacagcgctcgaagggcgggccgacctgcttggccctgcgatgcgcgacacccaagcttggctcgacggcgacctcgttcgcctgctcgcgctctggtccgacggcggcgtctgggtcgacatggacgttttgctcgtgcgcgatctcgcgccactcatggtcggcgagtggattgagcaatgggactgttacagtacgtcattgctttgggtacgagactccagtcttgcagacgactgacgctcgcacgcgtcgaacccgcagacaagccgtaccaggctctcaatggcgctctcatgcacttcaagcgtcaatcgccctacctttgttcgctcctgtcggtcatggccgcctcgccgctgccaaagaagggcacgaccgcctggggcgctcacctctaccagcggacgctccgccggctcttgcacgccggcgtccggccgttcgaggtcctgccgtggtgcctgaccgacccgcgcaactgccgagtcgacaaacgcgtgccggatccgttcaaggccgatccgacctggttcatgggcaagcgttgggctgccggagggcgcgacgcgctgaaggtgcggccacactcagatcttcaactggtgctctcgctgacttttctcgttcccctgtcgcgtccagagcgtgctcaacttcagtgccgagacgggcgtctttgcattgcacctccacaaccagtggtcgaagagcttccccgccggcggctgggtacagaagcttctcgtcgagccgatagagcgcacgcttgcctcgcgaccaaaagactagagattgattagctcctcatcctcgagcgaaaggacttgcagagtgtcatggtaggaaccggaggcaaggtagcctgggattgagagagaccagtgagagtgagataaaggggtgtttgcttgcgacggttcgacgtgtgtaggggacagcagagagagcggtacaagattacaaggcggctgcgccagccctaagaggaggatgaagaagtgcggaagaaaggaggcggagcgtgcggaccagcggacgtgcttgaaggtgacgggaaaggcatattggagcgagagtggggtaggggaggtcgtcatctagaggcggcggagggcgatgacgccgaagtcgagcgcgaggccatcgaggcagccctcctcgcacttttccgtgaggatcgagaactgcacgacaccaagagtcgtcagctgccggtcgctctcagcgtaccattgaggagagcacgacgcaccagggcctgcagagtcatctcggtagcgcctcggctcatgccggcgcgctcgatcatgacagagcggagatgcgcttcgtagacgatctgattggcaaacggtcgcacggggtgagcggtggcggggccatgtgaagcgcaagattgctcaacttaccttgacgaagctgacaacatgctcagcgtagctgttggccgacagcgtgccggcctgcagggcacgatatgcagggtggaccatctgtatggaagagcgacggcgtgcacatcagtctgtgccatctctaacctggcaggagcagaagcgaaaggagagccgcaccgtgaagggcccgaggtcatccggcacgcttgcatcatcctcgtccgtcaggccatggctctggataacttcccagtcggccgcgaccttcgcgtcggcaaacgtccgccggagctcggcgctcgaacgcggccagagcggcaggctggtcgtcaaaagcggcgcaacggccgatcggatcgagccaatggagacgagccgagtgacgcagaccgagaggacgctactgatctggcgccagacgtcggaaccggcagcggtggccgactcggagagcgagccggctcgctgcttggtcgccgactcgtttgacgggtagggcgtgctgccgttgtcgtccaaccgaatctttgcgctgcggaacgtcgacgaagagggcgacgacgcggccgacgactcggagctcttgcgctgcggctgacgactgttgctcattaccatcgccagaacgaggacaccttcgggccggaactcgcggctccgggcgcccaggaagccacgtagttcgctgtcagcagcggccgacatgctgacccctggcggccggggcgaatgcctgtggacgaaaagagagcaaggatcagcaggaagatctacaagggctgcgagctcagaccgtaacgtacagccactgcagatccatgacagagaagccgacgtgaacggtcctcggcggagccatgacggccccaaaggccttggcgaccgagtatgagaagacgcggtccttgagcgtctcgtgctggccaccaaggaaggccggactgaggtagctgccttcggcgtagaggctagccgtgtgctgccggaggtcctcctgcggcgactggtggtagaccgaaaactggatgaggtctgacccggcctgacgggcgttgatgcgggcgatgatggggcagacgagctcctttgacgcgccctgcgtcgcactgtactcgactggagagacgaagcggaacggcagacgtgtcagccagaagcttgaggtcaatggtcgaggcgttgctcaggcctcaccgatcgagacgacaccctctccaccgccgcttttccagtcgagcctggccgacacgcgatccagcgtctcgacgacgcgtgcacgcaagcctggcgcaaacgcactgctgccgagcgtcgcgtcgacgttggatgcccgctgcttggcagcggcgacaccacccgtgcctgccgggctccggtaagagtatgccgaggcatgagccggtaggggaggctgcggctgctgaagccgagccttcgacgacgaggccacctggtcgatgatgatcggccgaccgctgctgactttgctaccgtagtcgaagaagccttcggtctgagttgtctttggcgacgggcccgacattgaggagtagtgcgcgatcaggtcggacgtgttaagccggtgtggcggcgactgggcggacgctgtcgggccagccgaagctgaccggtcgccgatcgagtgggccaagacgatctccttgaagtaaggcgaaggcgagaagacgggcaggccgtcggtcgcaaacggcccggctagcggaagcgacatctgcgacgccgtccgcaacccgtgttgggagccctgactgctggaagatgtcgacggcaagccgtgaggcgacggctgatgctgaagcgacgacagtggccggacgtgagagtagtggtggggatcttccgagtcgggtgtcgtcgcataggtcgacccggccgacgcgctctgggagaaggtcgacggctggcgagcgctctgaaactgggactggaagcgcgcccaaggtgacgaaccgctctcagggccggccgagtcccatgagtcacttcgagccgagttggagaggtcgacgccagggacggcgctttggtcttcgcgagaggcgtgacccgagctagagttggagctcgaaggggtcggtaagccgagcccaacggggatcgtcgtcgacagccgcggcgtccgatcgacgatgcccggtccctggcgcgctggcggtgtgtcgcgctcgccgctggccggaaggaacgaccgcttcgaggcagatggcgtctcgaccgctgacggcgagtcggacgcagtcgtgagcgaaagcgactgcatgtcgagcgtcttgatcggcgcgaagccattagtgccgtcgccgccatcgaccgcgcatgtcaggctggtcggtggcaggctgccgtcggcctggagctggatgccccgccggtcctggagggatggccgtcgttctggactgtgaacagggctcgatgcagacgacactggctggccaagcgatggcaacgcatggtcagcggctgcgccgcggccaccagcagaagcagcagccgtagaggttccggccgaccccgaccgcggcggatcgtccaggaagggctcggagctcgtccgagggaagcggaagccggccgacggaccagcgttcggcagcgaggggtagatgctctgcatcgggacaagagtcgaggacgagctcgtgcgcgattgcgaggcggtcgcttgagcggcgaggaagaagggcggttgcgacgacgaagacgacgtgtaggtatcgtcccggacgggcgaagtaccaggcgatcctgtacgctcagcgatgaagtccatgctgcttcgcgccacctggtctcaggcaggagggaggaggcgaacggcaagtcagcgctccgattagccgagcttgagctcagccgaggacgacgctgccggtcgcgcactcacgggaaagctgggtggacgcctgccggaaggatgtgtgactttgagttccgacctagctcaccgcgctccgggcgacagttggagaagaccttcgcgaggctccgacctggagggaggaggagagggagagccggccgagacgaggagggcgtgtcaagcggagacggctctgcgcgcgccgagggctgaacaggcgggctggatgtcggtccgggacggagagagaacggagaccgggaggcgagacgggcaaagggggaccgaatcgcgcaagccagccaaagagcggacgatgtgtggccggcggagggaatcctcggcgacgggacagggaggaggggctggcgggccgcgtgtcgcgtgtgcgcgcagctgctttgcgtcccgggtcggtacgggcggcgagaagggctgtagaaggcgagagcggcagggtactttgcgtcgactcgctgcttgccgtctgacggcgggtggtcgtcgtcggcttgcgcaagacgggagggcgacctgtccgtccacgaggagctggctttgcttgctgagtgaggccgaagcgcagcggcagcgagttccgggcgtcgcagaatcggtttgacctcctcctcctcctcccgggcacgggaagggtccgacccttgggtcacatgcgatggcatgccgctcctgttcgcgaacgcccctgctggcagctggcctgctgctggcctacctgagcagctgaggacgccctccaggctgaccaggtcagatcggccttcattctggaagctcaattctcaagccaccggtgcacagagtttactctcaggccagtctgcttccgtctttccaagcccaagccgccgtttgagtgctttgtcgcacgctgagccaagcggcggccggtcggcctgcgccgtcactcagcaggacccgctgctgcgggccgaaacgttcgacgctgcagagagagagacgcggcccgaccgcctgcaggctggcaggagacaggcgaggtacataggcatttacgcggcagcaggctcgaccctgcgctagcttcggtcgcgcagagcgaattgccagaaagcccgcgacggccgagcgagggttttcaagctgcatgccctcggccaagcgtttggcggtggctgagccgccggccgtcgccctctttcgaaggcgatctgcggggaggcgagatgaccgaggacgacgacgcgcgaacaacgcgcgagcaggcgtccgagagctcctacagccacgcgaccgcgctcgcccggtggctgatggtggaagtggctggcgaggagatgtaccccgcacatcgtctcaagccggccggtgctctgtcaagcaggcagtaaagggagcgctgggtcagcaacgagagacgcgcgcgcactcaagccaggacgtacctgactcgggctgcggcgagccctcctcaaaggtgcggacgagccagctgacggcgacaatctctgaatataaggggtcgcgcggtgggtggaaagggagccgatcggaagtcgaagccgggcggggaggaggagcgagggcgagacgcttcagcaagggggtctccaagagcgaataagaacgaacggcacttacgccgcagcttgtggctgattggccaaggagagggacgggagagaggagagaagcgcgcaaccgaaccgtcagctggcggtgcgcgagaagcagcgcccattgacggacgcacccgaccgtatttgcctcgagtagctcgccgtaccggtcgtagtccttcgagccgcacatgacgatgtgcgtcagtgccgggtcgcgcaggtttgtcgtcactcggccgccatgatctttgactagggaagaggagagtcttgtcaagtccagaggcgcctgcgacgcagctcgaagggcaacgcaccctgaggctcaaaggccgccagctcatccgagacgttctgttcgacgtcgagctccgagagatcgttctgctcccacaggtcgagcgtgtcaaagtaaaacaccctgcagaatggagactgccgtcagttcatccgtttgagtagccgtgcgcgatcgggcgagacgcacatgtgctggaggtagtagtcgccgatagccggggcggacgacgcggccgcagaggcagggaggctctcattgaagccgctcgcaaggctgccgttgtctgtgagcgtcggttccggcgtgggcgacgcagcagcggatggctcaggctccacgtggaagacgttgtcgtcctagaatgcaaggaaagcagtgccgccgacgtcagacgaaaaacgtgacaggagggcggcggagtttttacgtaccgactcgaactcgtggtcgtcttcggtgtgcgaggagccaacactcaacacgtcctcgccctcgttagagaagttcggatcatcagccgtcggtgccacctttcgtggcaaccggtcgccgtcgtcctcgctggcgctctcgtcggccgagtcgtactcctccggctcggcttcgtacgccttggtggactttgtggcttcggtcgcgaagagcacgtacctggaggtcaaagatccgggtcagtagtcagcactcagcctcaggggtgacaagcggcagactgagggtcacgacttcgagaaatgcggaaggtcgcgcttggccttgatcgagtcgagaatccactcaggagtcagactggaatggagacgatcgctagatcagctcctgtcatgcgttgaatcgagatgcgacgcacatgtcaacctgcagaggggcctcaagtgtcagcaactacctcgcaggagacgaggacgaagactggcagtcgacgcacggtgcccgtccggacaagcgtgttcgtctgcgccactgtcaaagtgaggttcagaggcgatgagtgggttgcggctgggcgcgctcatgcgggctgcgcaacggaggacgacgtactgagcttgcgggagatgacaatgaggaccgtcccgtcggtcgtcggcttgtagttgctcttgactttaccgccgtgctcgacgaagagtgccatgagcttcttctggtcgaccgagtcagatccggtcaggatgtctgcagagcttgtcagcgatagcggacggtgagtcgaagcgcccggacgaggatcacgcactggcggtcgtgccagagaagatgtcatccttgacgtcgacggccttcgagtcgatgccttcgaacgccgataggaccttctgacgcttgcgaatggcgcccgcctgcttcttggatgacgcgcccgtgccgccatcggccttgatctcgtgcgacttgctctgcagcttgtaccagtctgaaagcggaggaccggcagtcgtcagttaaagctcgagtcttgcaaaacagcagacttaccctcggtcgtgaagtgcgccggctcctccatggtgagattggttgctcctcgcgaggccatcttctgttgcgtggcgaggtcgtagcggaggtacttcgcccgcgggaagcggagctgtgagagcagaggagcagtcgcgtcagtctaccctcaggtccccttgagccgggctaggctcaccgtctggcccatagcaaactcggctgcgacgggaagggccacattgtcaggcgcgaaggtcgatgcctcagatgagagcactcacccgagtcgacaatctctgcgcccttgacctgaaggacaaatgacttgctcgggtggatccagaggtcggctatgatgagatgatcagctggaggtctcgactctctgcccgacaccgcctgcacgacgcacgcttatcctcgcgagtgccgacagcgaatcggatgcaagacggccaggatgccgggttggagcggttgaacgggcggaaatcctcctggtggttgtgcctgagaggagagctcgtcagcttgcttgacttgtcgaaggtcgtttgatcggcgcaggcacgcacttcacccagtcaaagtcgcgcaggttgaggcccgtgccgaccttgcagacggtcatgtagctgccaaagtgtagaaatgccggtcagcggcgggaaaagcagctaagtacgcgtgcccacacttacacgtcgtcgcccttgtcgtcagtctcgtcgaggaccttgaggcccatgaggaagccgccgatacggccgccgcggttgccctcgccccaccaagctgcaagcaggagcgctcctgaacgtcagccagcagcataggtttgattgagctggatcgacagacaaacccccgaggacgagcaggtcggcgttctcgccgagctcgtcaaagtagtcgggcttgatcttgatccaaaggtcggtccggcccgagggcgtgtacatggccgtgttcttcttcaggatcaggccctcgccgctgtaaagtagcggacagcaactgagtcagctttgctcatggcgacggaaggcgagccaacagagaagcaccggcggcgcagaatggcgtcgaggtcctccttgatctgctcgggcttggtgcagccatctcgccggtacggaaactcgagccgatgcgtcaccttgcggacgacgccaggcatgtactggcccgtgctgggattggtcgctccttcgagaagcatcttgcgctggacgaggtggatccgcggatcggatgcgagcgagcggcctcgggcgtcgttcttgcgccgcaggtagacgatgtcgaacaccatgtctatgaagaggaagtgtgaggtcagtgatcagtggatttgcgcaccatcgagctcagcggcaggcagaaggctcacagatgacgttcgggtcgtcggggttgttagtcttctcggctgagcaggcgagtgagggcgcgtcagtcatgggggcagccgcgcgagtgacgtcgtcgtgcgcgcaccaagcgccgtcgtcttgagcgtgccaaacggtaggtgcctctcgagtcccgggtcccaagctaacagctcgccactgacggttgaagatcaagtcagcgactttcagcattattgaagccaaaagggcaggaagcgcactcgagaacgcatctggttgagagaaaagcgttgcaggggtcagccaggcgaattgacgtgcgagtagaggaacggaagggccgcactcttcgacgtcgtcccggaacgcgtcggcgatgaacggcgtcagagcgccttcggtccggtcgcggccgtacagcgacgtgtagtccttgccttggctgtggagttcgtcagcaacgcagctcagaacaaagccaaggcagtcggacgacgtaccgcgaccagtactggaacttctcgcctttcttgtgcagctggatgcgttcgccgtcgagcttctcctcgatcatctgtcgagagaagacagtttcaggtcgggtctgcgagtggagggttcgccagaaggaactcacgaacgggcctccgagcttcttgaccgcctcagcaatgctgcggcagaggcgcgacgagcagcttcagtcaagctggtcgattggaatggtcagggtgcaaagcacgaaagccggctcactttccggagttgcgcgccgcatacatcggctgaaacgggctgaaaatgttgatctgcgtcgcctgagggatgcgatcgcaggccggtagacgagggtgccatcagcgcagctaagcggagctgtcacgcaaaggcaacggacctggtcctccttgtcaagacggacgcttgggtcccagagtgtccagcagacgcgcttgaggtccgagcagacgataaagagccgcatcgcgtccgggtggaagacgtcgagaatcgacttctcctttagcgtcagcttgatgtctaagacaagccgagccgacaaagaagcgtcagcaatctgacagagacatcttgaacgaatgaagaggcgcttacccttcaggatgatccgagcgagccaactgcgggacgaagcgggcgacaggtcagacggtgcgcagcaatcgcatagcgcgtacgggcaagacgcactgctgggattcggggctcaggttgcgctcaaagtctttgagcacgcgggcggcagccttcctgggagacgccgagcagtagcaggggagtcagacgatcagtcacgtggacgaagcgagttgctgcaagcgacggcgcgacgcactgttcaccgcggacggtcgcgagctcgtcgagcttctcgttgacatggtcgatcgagtagttgtccttgccggtactcttgacgcgcaggatgctgtagaggacagaagggaagtctccggtcccggcctgttgcgggccgcaggtcaggtcgaggcgcgccggggcagagcgttgtctagaggacgcacattgtcgaccggcgcgccattgttcccgatggccggctttgtccagttttcgagccggaaggcatcggcgttggtcttgctgtcgatgccgaggacggcgttgtacgttttggcgagcttgccctccttgagctgaaagacggagcgctcgcggtcgcgctgcgcggcggaagcgtcgccagggggaggaagccgaagttagcacgcgcccctcccgcacgaagcaagaaagcaagatcaatcaaggaaggcgctgacctcagggatcatcagacgaatgaccgggtactgtggggggagagatctgtcgtcagcacgagagtcaaagggtcccacccgggcggctgacggtcgagcctcgtcgccggcggcgacaggaaacgtacgaggtcgagcccgatcctggcgcggtaattgtcaaagaacttgacgagcttctcgcgcttcttctcgtggccctgggcgtcccggatcgcctccatgacgaggcagagcttgaagaatgggaacgacggccgggtcgggtcgtgcggcgcgagcttggccggccggaccatcggcgccgcgtccgtcacggctggccctggcgtctgcgaggccgcgttggccctccactggccgggcatcgttgcgtccggtagagcaggcggagagctcgcagccggcagtcgcgagaggataggttgtccaagaatggcagtctgtgagtttagagatgatgcggccagggctagctggtgggcgcagtcgagcgcgtcgtctctgagctgccgacggccatctgcatctcttcgagcgacttcttcccttccctccgcaacagcggatctttatctcggcaagcttatgtgcgtctagtaggaaagctgtggaccgagctggtcctgaactgaccctcttcactacctgggcagggagcggagcggctcctaccagcactcgctcgtcgccgcctcgacggccggcccctccgacccctcagcagcggccggctcgagtcggacaccatatcgtcctggcttccaacccaaaggcgtctcgcgctctcagaccgatgtcttcctccaagcccggattgggcgcgaggagcgacgtgagggtcggcgaggggaggagcgtcggcttggccgccggctcgagaagctcgtcgcgctgcactttacgccgccatcagtcaccgctcgggcgcagaagctccgggcgctcgaggatgctgcgaatggcagccggacgtccgagctgaaacgtcccggcggtctcaaggaaggcggcagcgcgcatcggcgcgagagctcgctcgtcgaggagctcctggtcgagggcaagagcccgcgcgacatctggcggtcgttcaaggagcgcagcttctcaggctcgcagcaggacatcggagccggcgatctagacggcaaggccaacgccggaatgacaccagatcagaagagaggtgcgcccgttgacgtctgatcttccgtcagtgcccggctcactcagctcgtcgtcctcctcgcgcagccgtcgagcagtcgattgtcaagtgggaggacgactcggacgccaagcaatgtaccatctgccagtgcgtcgcctcgctcgtgctggcccagattcatacgtcggtcgctaactccagctgtgcgtcgccagagccgccttctcctttctcatgcgtcgccatcactgccggctgtgcggcctgacaacatgcgcgctcccaccgacgcctccgcacctgataccgctgacggccaagccccggcccgaggcgtgctcggttctcttcgtcgccgactggcgcgacggccgatgtgagctcgtgcctgaaggcttcaggggattcctcaaggttggcgtcatggccggcggacagggtcgggtgccagaagagccggaggaggagatggaggtcgacggcgtgcgagcgtgtcggcgatgctggaatgtcgtcgagtcagtcccggttctcatcttcttcttctggtcgctcgacactgatgcgtctctttgacccgcgtcccacaggaagaagcagtacatgctcgacgcggccaaggtgccggccttcagccggatgtacgaggtgcgcccttgcgtcaaaagctccgacacggggagtccagctcatctgaccgacccaccctactgctgcaggcgctgtcgacgattcaggccgagatcgaggatctcatcccggagcatcgcgagctcgtccgagcatgccagtgcgtcctctcttcggcaccacacgcccaacagatttgacgtatcccggctgacggagttctcgcaaacctcgacgcagggccgacgaggcgacacccgaggacgaaaagacgatggtcgagcttcgtcggacgctgctcgagtccttctcgacctacgacgcgctcgccaagcgtatccgcggcctgccttgcaccaaaggcagttcgcaggagcggcttcaaatcggcatcggcgtccgtgcaggcggctggctggccaaggagatgacggcggtcgaggttggtcttacgacaatgcctctcaccctttcaaatcatggctgacccgccatcgcctgtttctctcgagcagaaaagcttgacgcgccagaaaaagaagcacgccaagaatgcctcgctctcgcctagcgtcgtcacggcagctccgtcggacgacggctcctctgtgcacaagcccgactctgacctggcgatgctgatccaaccgctcctcgagcaggtgcgtcaagctcagccggattattcgcctttgaacacaaccgctgacaggctgtacttcatgcctcttgcaggaggcccaactcgagtcgttcatcaaggaggccgagtcgcgccgcaagtttgaggacgctcagagcctgcagctgagcctcgaggagatccggcgtgagatttcgcggatcgcggccatagactagcatgctgcttgacattgatatgggcagcacttggattaggtcagaacgacagagcgagatctcgaggccgccgccgcgcagcagcagtgaaggcagcgcttgggcgcaacgaccgtcgtcttgagttgtaggccatgctagccttggtaccttcagaccatgcagaccgtcagggagcgctcgccccggcggcagcccgtcttcaggcggtcgagagacgccggcctgtcggcggccgacttgtacgccgccgcttgcgttcgatgacccggatgagcgggcccttctcgctcggcttcgcccgacatcaacctcgacttcaaccgacctctcccaccccaatcccctctccattttattgtcagtaagcagtatcaggcagctaagctcgggcacaagctcttttcttcaggatgtcggtgcgtcgcagctcactcgtttggaggctcgccgatggtcgtgcgcgctcgagctcgccgctaacgccctgagacccggccctccaccgcaccctgccttccctcgccgacagatgcagaccggcaccttccctgtacgtgctctggggctcgtatctgctcgaactctcgctgacccgtcgccctgcttgtcgctatccagatcggttcgtccggctcggtcggctgagcctccgaagtgctcccgccaccaatgactgacacgatctgctacgctactgcctgcagccatcgcgtgcgccgttggcctcttcatctttctctgcatcggtggctttgtctggaatcggatccatcctccgacggccgagcaggtagccaacatggaggcccttcgccagagccaggccatcggcggcaacgcgcggttcgcgcagtccttctacccctcgacttacatgttgcgaggcggcggggtgatgctcgccggctatcgcagggccgaggcggcaggacctgagctagggccgaaacccgttatgtgggaggttcagcagcagcagccgaaggaggagctgctgcgacctggactcgaacagtggcaggtgcgtctgcgccgcgtcttccgcagcctgcgcaagcaatgtctgacccagcccttcctctatcctcttcagccgatcgcactcatcaatttgactgagaacgtgcaggacgatgacctggatccgctgcctctgccatcagctgggcagcgcgtgcgcattgccgtcctcgtcgcgcctccgacggcgctccagacgaaggctccgagaccgctcacggaggaggctttggtcgacggggaggaggaggacaaaggggagctggacatcgagctggcgacgacgactgttgacgtcgtgcgattgtgagcagcggagacgacgtccttgcgtttcggatcagcgcgcacggttgcgcggcacactcgccccttgtaattttatgttcgttgtatggctcgtgtctggaaggcaaggtcgatagtctgcgtaccagcatgtgattctgcgggtagggcgtccgacgcctcacttctgccactccttctcgaggccgtacacgcggccagccgagccagccatgatctcgccgacgctctctcggtcgagcttgaggctccgcatcagcttgataacgaacgggtaccattcgcgctgcgcgtcggggacggcgggcgtaagcgtggccgttgagcttgacccaagtgtcagcgggacgctccacgagccgaacaaaatccgatgcgaaccaaagctgtcaagggccgggatgatgaagtgcttgaggacgctaagaggccgcaggcaataggaggtcagccaaagcacacgtccacgacgagcgcgatgtagggcggacgaagagtgccgcacctgatcaggtcgtcctcgtcggtccaccagccggcgctgtcacccgagctgttgaggatcgtagggggcaagaatttgaggcagacccccgggacaagggccagggccgacagctgccggacgtaggtctggtaaaaggcctggtgcgggagcatcgtcgacgagaggttcgaaggcaagggcggaggcagcaggccggctggcgggagacggaagacgtttgagcgtcagacttgttcggcgtcgggaggccgagaggcgaagcgtcacgcacagaggacgaccgtcggctgcttgacactggtcgaagagctggctgcgctgacgccgtcgaggctgcccgtctcgctcgcctggacctcccgcgctacctgggcgacgttgtcgagcacgcggtcaatctcgtcccagactgcgtcgtccagagtagtcggcaggacgacctcaaagtcgagcacgtcggaggaaaggtcgaggccgggcgttgaggccgacggaagcaagatcggatgcacagggcccgtgcggaggaaggcagagggctgctgctctttggcggcgcctgcctcggacgagctggcggttcgggtgatgccaacggcgcccatgatcttgcgcccgccggccgagctgtagccgtccaagacccgggcgacgtcggcctttgcgttgagatgggcatcaaccgtccggttcgtatcgaccgtctgcgacgtcggcgatgggggaggggcagagaacgcagagagtggcaaccggagcggtttgggtcggggcggcatggatgtcttgaagaagagcgcgaggtctgtcaagggtagagggagaagaggggcgaggcgagggcctgctggtcgtgtgtggtggtcaaagggaggcgaggcgcctgtctgcgctggctcctcttgcccggctccttgttgccgcgcttcggctccgaaagacggcttgagccgacgggcctgaaccagctcgacctttgcctcttgtcgtgcagacgacgtacgatttcgagtctgaagatgggatcgacctactagcaggtgcgacgacggccttgtgtcggcaacgtcggcccgcaggagcgacgtcaggccggcggcgctctcatcggccggcttgagcgacctatcggcctcgcctccgacggcctccttgcctcataaccccatctcttcatccagattcgtagcagacatcgccaacttctggagacgatcttcatcgcaggatgtcccaattcgccaaagcgacctttgatgccgcggcctacctcgcctgccggccgacgtacggctcgcccggagcgtcgccattctacgagcttacgtaccgctaccactcgcgtcgcggtggtcagtggggtcaggcgctcgacgtcggctgcggcccaggcttcatcgcccagcagcttgccgaccgcttcgagcacgtgacggcggtcgacccgtcggccaaaatggtcgccgtccgcctccagcctgaggcggcaaaggcagggcggcctccgatcagctaccacgtcgcgtcggccgaagatctggcgatgctcgaggcgggctcggtcgatctcgtcactgctggtcaggccgcacactggttctcgtacccggctgtctgggaagagctcagtcgtgtgctccggccgcgagggacggtcgcttggtggggctacggcgagtaccagctgccggcgtacccgtctgtctcgcccatcatcacgggcttcatgcggtcgtccgacggcctcggcccatattggcagcagcccggtcggtccatcgtcgaggccttgctcgacccgataccgttcccttcgcctcccgccgacgtccggacgagcgacagctgggatgactttcctctcgccgagcccaatatcgagcagcccgcatcggtgacagcgagcggcggcgaatgggacccgtcgtcattcgtacggatcaagacggtctcgcggtctcccgaggacggcccgcttgggatccgcaagacgctcgactggtcggcgctcgcagcctaccttcgaacggcatcggccctgcacaagtacgaggaagcccacccagaggaggacgatgtcgtcggcgagcacgtccggaagctccgcgaggcggtcaagcgcgaagcagggcacgacgtcgcttcggtcgacgtcgagtggccggccgtgatcgtcctggcaggcaaggcctgatgcatggcgacgatctcgtgctccccacgccacccgtgaagcccttcagcgacctctgatgcgcgtgtactagacgggatggccgcgccacgccggaagtccgtgataaagcgtcttctataagggcagcccgggtaagatagcgggcctactccgagtcggacaggtcgtcctcatcgccggcctcgctgccgtcgtcttcggacgcctcatcgtcgacaaagccgttcggcccgatctcgcccgctgaggcatcggaaccggcgtcggactcgctgtggggtagaagggtcaaagtattgtcagcgaaagagcgtgcatgacggcacagagcgtcacggctcgaatggacgtactagtcctcgccctcggaatcatcctcctcctcgtccgactcgccgccaaggccgacgtcctcgacctcgccctcctcgaacgcaacctcgtcctgatcctcgtcgtccgactcgctgtcgtcatcgctctcgccctcgacatagcgcggcgcctcgccctctgctgcctcggcaccctcggccgccgcccgcagctcaagctgcgccagggcgagctcgagccggccagcgaggcccatgagcggcgccgtgagtgcgagccggtcggcaatgagccggtggagcggctcgagccgactgacgagtcccgggatcgttgcgaggaacgcaagccgctcgcggagggtgaccttgagccaggtgcagacggcccggacacgctgagccgaggcgccgccctgccggcccttgccgccgagcgcgagccgctccgccagccgctcgagcaggggcaccgtcagctccggctggagtcggcgaaccgtgtgcgcgacgagggacgggtcagagtgcgagaggcactggttgagcaggggcgagtcggccgagtggagggcctgcgtcaggagtcgcgagagcgagagcggtgtcggcttgccggccgacgaggtcgaggtcgaaggcagcggcgcgagcgtcgacggcgcctggtcggccagcaggtcaccgaacgacgggccgtcggtcgctgcggcggccgtcatcgggtcgagcagaggtgccgacgtcgccgtcgccacgttcggcgtctcctggtaccgggtcgtctgcttcgtctgttgtcggccaaagtttcaagattcagcacctttctcctcttttctcgggcgtgactttggacccaccacgatgtcttcggcctgctgctttgccttcttggccggcgggctcgacggcgcaggagcggtcgacgtcgacgcggagggcgccgccttggaggtcttcttggccatcggaaggggaagcggagcgcgaaagtttggagctgagagaccctggagccggaagtagatagacgcgctagctgctagagacggtcgagcacggaagggtacaaggagctagggacaggtcggatgggttgcgcagggacgagggacggcgggccggggcaatccctccctgcccttgaattctgtaaccctagctcgaccaggcgcgatcgacgacgagcagccgaccaacgtcccgctgcctcctgcctgccttctgccaacagcatcgcctcgagcagcctcgttgaaatgcgcttcgcctcgcccacaccgcagccgacagcgtcgcccgcccaccgccggtctgtcgtttttgtacctgcgccggctgcagtccagcccgaggcgagcggttcaaagccgcgtcggccgccgccgccgccgccagcagcgcgaccccggccgagcggccggttcgggctcgacctccgcaagcgcgagtgggacgcctcgtccgacgacgacgacgacgccagcagcgatggagcggccgagagagcgagcgactcgagcgacgacgacgaccgggcgaggacggacgacggggtcctatcgcaactcgaacgcagtgagcgccggcgacgacaagcgaggtccgtcgcgacctagtcttactcgtgggacctatcatctgcttcgctgactggtcgaacgctctgctgctcgcacccacagccggtcaggagaagccttgtggtcgcagaccgcgcctgagcccgtgttcgtcgatgagattgagtcgtacgacgcgcgtgcacgctcgctcgcctgggtgcgtttgagccgctttcccttgcagcgctcgagactgatcatctgctcgaccttctcatgcagcgcaagtctcatcagtcggcccagactcattcgatgaggctcgctgccctgctctccccggctgcggctgggccttcctccaacggcacgtcgggccgcaaaccgagaccgcaatcaggaggtctcggcatggctggtggctcaacagcacacggcgacgacgatgatgacctgggtgaggtccgccggttgctagagggcctccgagtcgagcgggcagaggaggagcgacgggagcgcggcgcgtttgaacggcgcaacaaggcgctctgggacgtgagtcgactgcgttgctcttggcggctgctacacttgctgacctgctggctgcctcttccgccccgcaggaaatcgaggcgacaatcgagttgtccgagcaagcccacctccaggccgcccggctcaagcaggccgaagccgacaagaaggcgctcgctgcccgccaagcggctgaagcggctgaggtcgacgaacgcaaggccgaggaagccacgcgtgcgcaggaggcggcgcggatgcgcaaggcggcggacgatgcgaaggcgggcgaggagcgcgagcggcggaagacggaggctacgaagctgagggagggcggcggtgggcttgaggtcaagggtgaggagtttggacgctgggtcgaccggatgaaggtgcgtcactcttggcttttgcgggccagtgcttgcgatccagggcctcttgggctgatcagccttgtccttgctcccgcagacaatcaaatcggacattctccccgttgtcgcccggaatcccgacttcaagaaggcctgcggagcggtcaagcgccagctgacgcccaagatcggccagctcacaaatgaccggcgcgagatcctgcgcatcgtccgtcccctccatcggctgctaacctgtgcgacgggagagagactgacttacctctgccttttgttcgacagacggccgagatctcaaccatcctgcatggcgccgcccgggctggacccgaggtctcgatctgggtcctcaaccatctcgcaaagacgctcatccgccaggccgaagccgaggtgacggccaacccggccgcggcctggcctctcgcaaggctcgtcggcggcctcttcctcatgggccatgccgacgcgctcggcgacgttctgatggcccggctcgtcaagaagtgcccttgggttgtgccgttctcgccggccaagcagccggtacggccctatgagagaggctggcgcttccagcagcacagggctgacgatcctccgttcgcggttcttgccctcaccaggaccagtccgaggcggagcaccgcaagctgctcggtcacctctcgagcacgcaagagtcaacggccgagtacacgaatcgccaagccggcatcctcacgctctacgccgccatcctcagcatcttgccgtcgccgactctcctccctccggcggcggttggccatccgccctacccggccttcacgccgacgctcgtccccgctgccttccgactcggcgccggctggtcctggctcgcggccatcctccggccgccgctcgctcactttgaaccgacgccgacgctcatcggcgccctgctcgacgtcgctgcgccgaggttgctcgccgcctacggccagcaggcgcgcaagctgctcatggcgatcgggcgggacgtcctcggaccccaggggccgacgctcggcggcgggaagaacaagccgggcgtcgcgcggcttgggctcaggctcgaagaatggcagcgggcgggctatgtctggaaggagctcgacgggagcgagccggcgtgaatcgacatgtgcacttcttgcgactccggaaagcgacttccggcagcgtcgcgcgcgtctctcttgctgcttgaccgttaagccgctcgaccatcacatccatctgtcatctaccaccttctcagtcacgatggagcccgtccttcaggccgccacccaggcccatgccgccatcgcctcgatccttccgaccgagcccttcaagccgctcaagcgtgggtccgagctgacggacggctgaagggcctgcaggccgagctgacgacctcctcccctcgccgccgccagccttccaccaggagctccaggccttccacagctacagcgccgacgcgagccggcacgtatcggccgtccacgtctgcacgcatctcgggaaggagatgcaccagtgcgtgccagctacgcctccttgcgggctgaagtggcgcagctgacccgatccccggtcgctccctgcgtgcaggtgcctcatcttcgacggcgacggccggcgcctgatcggcatcgaggtctgtcgttcctactggactgatggtctctcggcctgctcaccatatctcgcggcctcgtgactggcagtacatcatttccgagcggctcttccacacgctcccggccgacgagaaaaagtactaccactcgcacgcggtcgaggtctcgtgcggcctgctccagctcgtcgagctcaagggcgtccctactggtaaggtgactgatgcggccgaggagccgatcatgacggagctccacaagacgtacggcagtgcgttctcaagtctgctctgtacggtttgggcacgcgactgaccgtcccctttcccctttggcgcgctctcacagagacgattcacgtacgtgctgcttcaatctgcttctcatgcgagggccagagggctcacctgcggctgagaccttggccacctttttgcagacctggcagtacgacatccacccagacctcccgctcggcccgccgcagttgatgatgtcgtacaccgacctgtcgcagctgccggagaagttcgtcaccgagcgcgacgccaagttcggcatctcgacggccgccaaagctgaaagccgggcgggctacctcgacggcgacttcgagccggacgagcaggccgaccagagcgtccggaccggcaaagtgcgcatacgctcgcttttctctgtggttccacgagctctttgaattgacgcgcgtcttgggatgcttgacgcagggcatcaagtttgagccggtctcggtcgaccgtggaagcgcagcgtcgtcgtcggcggcggccgagcgcgcgaagaagacctttaccggcgccgttgagaaggaggttgccgagggcatcaaggtcgtctcgccgccggcttaggggcttcaaggtccacaccgcccgcgattcgtcaacaaatgactgacggcgaacgacgaggacgacgatgcgcagccagaggcaacaagtggtcttgacgtcatttggcaaggaggatcttgtgcctcttgtagcagcgcatctcatcgagggcgtagagacgaaccccagcaggcgccttcttgctctcgccccatgcacccggctttgtcctagccatcgccccagttggcatctcgctcgtcaggcccgtcacggtcgagcgctctgtcttacatgcccccccttttcaagccggacgatgggggcgaagattcatacaaccaggatgaggggatcgatgcagcaagggggccagcgcaccaagatgggacgtgtgtgtgagagtgcgggtgagacgaggaaaggacgagtgcaagcgggtcgggcgtttgggatgcgagcggggtgccgacgggtaaaaggagaaaattgtccaaggtgtcaagagaggatggaaaggaagagggagggctactcctggatggcctgcagctcgtcaacccagcgtttgcgggtcgcctcgtcctcgcagacaaagatgttcgtcgaggcagactaggtgaagcgggaaggacacaatgtcagcaggagacgacgctatggcgctcggcgcagaagaaaacgcatcgcacagtatgaatcgaaatgcccttggagcctttctctttgaccgacttgagcacgttggcgccccctgccgagcctccgccaatgccgctacccgtcccgcggcggacgatcaggcactcatacttgagcttaaagctaccgtcgccctttgggtcctgcttgacgcacagcaggcgcgggaagtcggtgagaatgaggaaacgctcgcgggccagccgggagagcgggttgagcgtcttgacgatcaacggcgacgaagggacgaggatggctgtgctgtagaggaccttctcatccggcaagagcgggagcgatctgcgggaacggtgacggtcagcaacagcaaaggagacacgggcgacttgatcgctagcagtcacgcaccgtcggctcgacttgccggtcggactcgtccatggcgcgctgacgtgccgctcgtgctcgttctggccgctggcacctggaggctgctgggcctggatcggcgagtaaggcgagtgaggctcgcccgtctgaccgctgctgatgctggtgttgatcgacggcggccggcccttgccgaggccaacgatagcctgtgcgacggccgaggacgggtcaagcgtgccaatcgtgccgatgctcgccgtcccgctcgagacgctgccgcccttgccgccgccgtgcttgctcttgtgtgcccagcggccctttggcggctcaaagtcctcctcgtccgaagggagcgactcctccggcaaaggcggcgcgacaggcgcagcgggtgtcatgccgtcgtccggctcgtcctcagacgtctcgttgacgtcgtcgaggcctagctcggcaaacaggtcgcgctggacggccggcgcaggcgggcctacgagacccgactcaagcttcggcggtggccgcgtgaatagtcgggtgaagtcgacgcccgcaaagaaggcgtgcgatcgaatctcctcgatgccggtcggtcccgcacctattcgcttggacgggtcgaggacaaggaggcgctcgacgagatcccgcgcctgcgagtcaaagccgtccgggaaggtgtactcgagcgctttgatcttctggaaggtgaggtactcggtcttgccccggaagggcggcgagccggtgatgaactgatacaggatgcagccaagcgcccaaaagtcggcgggctcggccgcgggctcgctcagcagcacctcggggctgacgtactcggccgtgccgacaaaggaccgcttcggcgggagcctcgaggcgtgcgagcccggcaggacgtcgaccgtgacgccaggcgtcgagggcactgctagctcccggacgaccttgccatcgacaatgggaagcaccttggcgctgccaaagtcggtgagccgcatgtgaaactcggagtcgagaaggatgttctcgggcttgaggtcacggtgcagcacccctcggttgtggacccagccgactatgtcgacgagctcggccgcgtaatgccgcgcgcaggtcaaggagaaagagccgacctggcggatgagcgagaggatctcgccgttcggcgcgaggtcgaggacaaagtctgcagcacaaaggtcagcgaaagcacgagacgaaatatgagagagcggccacgcacaaagattgctcatatcctggaaggcccaggtgagcttgacgacgcccgggtggccagcctttggctttggtcgaggtcgaggagcggcctcctgctggcgctccatgaggccggccccttcgagcgaacctcgaccgggcgaggcagatgcgcggatcgttcggtcactcggcgagttgggcatcatcggctgcccgctcagcttgcgcggcatcgctggccggccgctgccgaggacgggcaacttgggcgaagacgcggcggagggcgccgacagccgcttgagcgcctcgacctcgactgtcgcgtagcgctcctttttgtgctgccggaggtggtgcttgtcgagaatcttgatcgcgtacgtcgtcgagttggagatcagggtcgcctgccgaacgacgctgaagctgccgcggccaagctcttcgccgaagcggaagcagttggggccgatagccgtgcccgctggcggaccggtcgagttgcgccggggcgcaggtgggctcgaagcagtggcggcggtcgaagcgacatcggccgacgtcgtgccgctgccgttggcgcttgtaccggtgctgctcatgttgggcgtcatgccggcgctccctcgccgaccagcggtgaccacaaagccggtgttgctcgcccgtgcctgagtcggcgtccgctcaggcaggccgggcgagctccggccagacgacggtgacgagtagttgccgtcgtaacgagcggtcggcggcggcgagagcgcgttccgcaggctggttgcgccccagacctgctcaggttgactggccttggtccgcgtctcgatcggcggcggcctgatcggtcgcgcagggatcgaggccgtagaagactgggacgacgtgctcgagttgcgctgcgggagcgacgacgacgacgagtttgagctcccgagaggcgtgagcgagtgcgtcgagacgttgagcgcgttcgggttgagcgacggccgcttgaggctccgctggctcgaggacgagatcgaccggttcggcaggggctgaagagtcgatgccattggagacagaccagcctgcgaagcgcgaaagcttcgagtcgactgggcggaaggaggcggcggcaactgttgctcctggcggaggggagaaggaggcacgcgccgggttcgccggcggcttcgctagcttcggtcgacggcaagtcgaacctcctgcgttggtcggtgtcagcttgtctgtagggccacctcctgagcgactcgggaggagagctgaccttaaaaagtgggcgaacaggagtacaggcaggcccaggagctcgggctctagcagccgtggggaggagtttgggtcagcccgcagctcgtctgccggtcctcgatggacccatgaactgcccgtcgagccctggcgaacgagatgcgtctcttctatccaccatgccagtgcctctccgtctcgaggatccctagactacggctgggcagtcgagacgagggccctcgcgtgaggccgcgtcgttggccgaccggggtccggcgctggagcacaaggtgttgcgacgaaggggcgccactcacaggttgatggaagagggtctgagacgagctcgttacgagaggcagcaggacatgggcgacagtcttgtcggcttcaggcgggattgtagagggaagtgagggcgatggcggatcgtgggctgaaagggagagagcagccagaagcgaactcgtccctcggcgtcaatagacccgcgttgtaacgtcgtctgttggtcggccgctctaatattgtgatgcgggccggaagagcatcgcgacgccagcgacgtcatgtataaaggggtgaaggagagagagaagggggaacccgacgtcagaggccgccgcctcctgtgcaaagccgatggtacagggtgttctacaagacagtcacagacgagagggcccaagaggaaggaggagagagaggtagatcgtaaagcgccaatctacgacggatagacgggcgggaggaagggcagcgaggccttgggcggcggaccggccaccgacggaggagtcgcctgaccgccagcggtcgactgtcgacggatcgaaccggcagtcgagctattgctgctgttgccgcccttgaagcggatgcccatgaacgaccggccttccttggccggcttggtttttggcggcttggaggcggtcgacgacttggggagcgagaaaagggggccgcttccaaagccgaacttaccgtagacgacggcgagatcctcgaggttggcagagccgtcggacgcgttgcttgagccctttgacgtccttgagacaaaggcgggtcgattggcagctggtggaacgatacttccggagcctcgtccatacctgcagatgtgaaggcatcgagctcggcttcagaaacggtccagagtcgcacttcgtatagaaagagctcgcacgcaccggtagatctgcgccttctcagaccgatcgtcgtactcctcggaccgcgcgagcgagtgcatcgacgaggaggcgctgatgctgggtgagatccgattgactgccgagctgaagcgctgcgagtgatggctcgctcgtcgagcatgagccgccatgccggcagggtcgattgaggcgttctcccgtacgagtcgctgctcgagctgctcgcgtgagaggccggcgccgagcgagagcgaaagatgccgatctgtgccaaacaggtcggccgtagcaaacgagtctgcgagagtggtcggcgtcgagatggcgaggccgagcggcggatccggctggcgcgcggcgccctcgctcctcgtcggcgagacgaggtgcggcgagggcacttcgggaatcgcatgccgagcgagcgagccgtctttgacgtacagagcgacggatcgcgacgagggcccgccctcgccatcaccgtccgagaccgacgacgagatcgagaggttggatcggtgccgggtctgctgcttggcgggaaaggcagtcgaccagcgcccgctggccccacgaggcgagccggcgtcgctcggcgtctcgggcatcgacaggtcaggcgtgctgccttgacttgaccgactcgcgccaaagcggtccatcgaatggctcgtcggaggcataaggggcgacgatcggactgacgacgtcagagaggcggcccgacttcgaccagggacgagatgcggcgggagcggaaagctgttggtgccctcgctgatcgtccgctgacggacgccgccgcggatgagggttgcagcgtgcggcaggtcgacgtccgagaagcccgagggcgtcggcgagttgccgacattgcgcggtgacggcatgctttggcatcgatcgaaagcggtcgagccggagctggaagaccgcgacgagagagggggcgcagggaagacaaagtcgcgcgcgtacgaattctggcggtccatgttagacgaggctcgcggccgggtctcgccttggctcgaatttgacttgccgaggcgggaggcgtcgccctctgtgccgtcacgccgtttgtcgtgtgcgccgctgccattgacacgcgggacccctggaccgccggcgccgggcgaaggcaagccgctcgctacctcagccgcagcggcagcagtggctttaagtcgcatcgcgcggaccatgagcgacttggcgcccgagataccggcgaccgagatgatgccgtcggcggtctgcgccaagagcttctcgtgcataacgtgtacgacgcgacgttccaggtcgagcaagccgtagacctttgagagaaggagcagcgagctcaagaccggaggcgcgagctggaccggcgtaaacaagtcgaggacgtagaggtactggacgagcgcgacaataaccgggtagggctcggtcgggaagtgaagctgggcgttccggagcagggcggccggcaggttcgacccgccgccgccgccagccgtcacgtcttggccggcggtcggctcgaagctgcgtgagcgagcgagctcgctaaactctttgagctgaccggcaagccatggccagcgccgttcgagcaccgagcgcgagcatgcgacccgccgaccgtcctcgcagatgatctggaagtcgacgccgaggccggtctcgaacgtgcggagcgcaacctttgccgcatgcgcgccaagcaccggtcgaggtgccggatagatgccaaaggcctcgaggtcgagcgtgacaaagtgcgagaaattggtcgaccgcttctggtagtcctcgaggaggtcagagtctagcgagccaaaaatcttgaagctgttggcggccgagtcgagcacgccgcggttccagctgccgatcttgagcgtctgggcgaggccgaggtcgatcgaaacccactgaagggtcttgatgttgagcgcccaaacgcagtactcttgaagctgtcggtgaggaggcaaaggtcagccaaagagcggcagcgggtgcgggaggtttgacgtgcaacgaactgtcgatgcgatgtaggtcccaccccaaacgagccagtcgccgacgacagaggcggaggggaagcgcaggccttgaggtgcaggcgacgacgtggtttccgcaaccatcatgtcgctagacttggccgtcaggtggaactcgggcgtggcgtcgggcgtgcgctccagcacctcaaagacgcgccggacgtccgtgaactgacgcatcgtcgggcgaaggagacgagtcagatcacgcgcgtcatcaaaggagtcgccgaactgacgttaaagttgctgtagagcaggacgtttcccgcaacgtcggtgcaggctgtcgtccgatagctgccgcgctgctcgcggttcgtttccatgctctcctttgcgacccagatgccgctcgtgagatcgagcacctcgagttcctggatgtactcgacgtctttctgctcgcgagcaagtgcaaaacgggcgaaacggtcagcgtcaatctcgccgagagcctgcgcagagcagatgggagacgtacatcctgcccgcctacgacgaccagcctgtcgcccgtcacagctgcgacgtgagcgtatcgaaatgttggctggtaagcatctgccggccctcgcctcggcacggctcgccaggagcgcgacgaaaagttgaagatgaaggtgctgttcgtgacctcgagttcggtcgtgcagccgccatttggattggcgatgacacccatgccgcctgccgagattaggttcatttcaggaccggctgctcaggcaagactaccaacccgcgacataccatggacgacgagattgtctcgccaaacctgggccgtgtggaagtagcgaggcgagggcgcctcgtcgccggcctgcggctcaatgcgcgaccaggtccggccgttgagaacatagagatcgtcgcgcatgcctctcgtctctatcactggaggccgcaggagcgggcaggggtcatcagcaatcagcaagggaaggcgcaacctgcgcgtggcgtcgttgctgcctgcgacggtccgagtgaaggtacgcacatcgacctccaaacagccagatctgacatgccggcgaatcgtccgacggcctgtacgacgtcagcgaggcgccctgcagatcaaggcagagatgcggcgagtaaggtcggtcagccttccggagccggaccaggcgagctcgcgcttctgctcccgccagcagcgagtcgagcaggcagcatccgggtcgtcccatccagcctgcggagcgcgctcgggcggagctcgggccacgggcgaccaacactctgcaggtcttctctgctcgggccgacccaggagcgagcagcgaagggcgagcgagcgagtgagttgcaaagaggccgaactcacgacgagcggcggcgggacgtcgccccgcgtccgggtcacccagctgcaaagggcgttcgggtcggcttcgaccaggctagacgcggccattggcggctttgcagccagggtgtcagacgacggcgtgggcaaaggatctggagggaggtcgtcgttggccggacgaagaggaaagggagggacaagcagtgcgcaggcagacaggcatgggccggcggaggcgcgcgcagcgaccgagagcagcagcacgaaccctcgctggcggtagaggccaaacgacgagcgggaccacccttcaccgacgccatcacacgcacatccaggccgacgtgaaagggacggcggttgaccttgctcggacgacgaggacaaacggtgcgtcccccggctgacctcccgttgggctgcttggcgggccagatcaacctcttgccgagccccgcctgctctcccacctcctgtgccggggcaagcacgacgggttgagaagcatgagctgttgctgctgctggatccgccactgctcatcgtgtcagagctcacccgtcttattcgatctcgctcgaccctcgcagcgaccgcctgtctgccctcgccatggtcggcatcaacgacgagtcgggccgcaaccatcggctctttccgacctggcacgagtactttgacgaggtcaaaccggcgatgcgcaacgcgatcgtcatgggcgcgagtgagcaggatccgaggagcacctacatcaccgcgcggttcaagaagaaggatgaacctgagctgccctacggcgagcagctcctccagtcgtacaaggtgcgtccgcgcgcgtcgacgccctgctgaggtcctgcgctgaaccgcgccttccgggttgcagcgctcaatcccgtcgtcgaatgcgcaaaaggcgcgcttcacgacgctccgcaagctcgagacgatccttgagcccaaggtgacgcacctccgcgatggcagcgcctgctactcgggcaacaccgagtggtgcgacggcgggccgcgctatgtcatcggcatgcacggctccgtcatcctcaacctcgacgacgatgggtcggacctcgacgtcgtcattatggtgcgtcgccgggagcggcgcgtctggaccgaaaccgttgctgatcggcagacgtcgcccgcctgctcacgcaggaccggaagtacactgacggcgcctggccgaccgacccggcggccgagccagaggcgctgcacaatctcgtctcgatccacgacatctttgacggcaagcgagggctcgaaagcctctcgttcaccagctcggccagtgcgttgcgcgtctcgctcggctgcctgacacgcgacgctgactgctctgacgctacctgcgcgctcgcagtttacatggtcgatcgcgagactcaggtctacttgaacattaccatcaacgcccttcacctgatgtactcgacgctcctcgtccggcagtacgcgctcctgcggccgctcaccttcctgcccctttgccacttcctccaccggctcttggacgagcggcgcaacgcccaacaccgccggggtcgcggcgatgcagacgaattagcaacgcttggccaccacgctgccaacctgctcgtcctcttccatctccagacgagcgcaacgccggactggccgttcccgaacctcagctcggacgaggcgatcaagcagacgcgaggcggcttcatctggtcggaggagttgcgcatcccgcacgagcagatgcgcgacacgtggctcggcaagatcagctactgctggccgatgccgtttggctggagcctggccgacaagctcgctaaggtcgctgaggacaaggccgacgaggccgagcgcgtcgcccggcggcgcgagaaggccgaagccaaggtccagcgcgaggccgaggagcgccggaagcgcaaggtcgagctcggtcagttcaacggccggaacgcgcagaaagtccggcgcctctttcccagcgtccggccaccaagccagccagcctcggtgctgcagagcgacttggagaacagcgacgacgacatcgttagcatgcggccgcgctgcccgtcggtctcggttgagcggagcgatgcggagattgacagcgaggaatacgactcggacgtcgaagagacgatcactcgccgcggcctcacctttaccgaagacgagtgtcggcagccgacgccgctgcttgcgggcccagtcgcaggccggtcaaccgataaggacgagccgctcggcgccgacgacgccatccaggccccccatgccgccgctgcggacgccgagcagccgtttacttacgaaccgatgcagcacgaggactcgccagcgtcgatcccgtcccatttgaagggcaagggccgtatgatatactcgccggcccctccgagcccatcgttgccagaaacgcctctaccgcctgtcgagcaggcgccgccgccaccgcagccgcagcctcctcagacgacgcccgcacccaacgtcgtgccccctccgacatccgaggtacccgacttggtcgaacccgcgacgaggctcgaggaggatctgctgtcgctcctcttcttccttcagacgttcgattcaaagacgcagcccgtccgagtccagctcgggtgcgagtcgacctccgccgagtgggagcgcgaccggctgcagggcatggtgcgaactcgggcggcgctcggctccttcaaggacgaggtcgtgatcgaggatgcgatccagccgggctgggtgagtgctgcttcgccggcaacttgtcacagtgctgcttttgctgacgcttgccgacgaatccaccagaacctcacgcccgaccttcctgctcgagtgctcgagacgctcggcgaggattgctctcggatcttggaagagatggcggccgacgagacgcgaccgctctctgagctgctgcgtctcgctctcgggccaatctcgccgccgacaccacctccgcatcgccaggcgccgtttcggccatctccttcgcctcaccggcggattccggccccgcgagtttcgccgccgccgccgccgccagtgcaccgtttacagtggccgtcccgtcagtcttcagcggccgccgcttcgcgaaacgacacgcagccggcccggcgcacctgcgctcagctggtgaaccagccacccccccggccgacgtcgcacgaccagccgcggaagcgggcgccgccacccgagacgcctcagttgatcgcccaacggaagtcagaccctcggccgccgctgctgcagcccgcgacgcctgtcgaaggctggacgatgcgcgtcagcggccaggacgtccgtcgtacatcacgaccgaccgcggccgacatgttccctcgcgggctgtcgacggcacctccatcgcggcgagagccgtccttgtcgccggtcctccctgcctcgccgccaccagcgacggccgcacgtccccggccgcccgagagtgcgagtccaccgccggcgccgccacaagcgcagcccaagccgaggcgggtttggaaggtggccgccgaggcaacgcgcgggaccggcgcaccgcccacggctcagcccaagtagccgacctgcgtcagcgtccccggttctgagaacgactcgccagcttcattgggcgtcaatgtacttccattcagatgtgaatggcttgtgcccctctcatactgctctaccgcccacgatctcacggcggcggagcccttggttgcagagcgcggcgtcccctcgtgcgcgacctctcctcggcctctcggctcgggtctcctctcaggcctcgcgcagttggaaacgccgactaatcgatctggcttcggtcagccctcgctaggaggggctggcgatcccacacggacgtcgctggggagctccagaggaggggcgacgggtgggcgacgcgacgagcgggtgaaatgagccgagccgctgcagacgcggccggcgggctatagatgagagaagtcgcgggacggcaagcagtgcgtcagcaagagccgaggcgggtgtataaggacgaggagccggacttacagatgcttgggcctgaagagcaccgtcagctgcagggacagccaggccgggcagacctcgagcgtgctgcgacgacggcggggttgcgacccggcctccctctctgcagctctttatcctcgtgccatacagcagggctatgctcgctcgttaacgcagccgcgcacggccatacagttgcgaggggaagtcaggaaagggcggcatcgatgccggcggggggctcgccgctcgccaggcgagccgcctctgagcgctgacttgcctccgaccctctccgattcgtgcgactcacttccaaaacacctgttcgacgagaagcccgataaaggcaggcgactgatgactgaaaacttcatgcgtccagtgcgacagggtcgacgcgtgggagcgagaaaaggcagacaggctacaaaggaagagggctcgacagaccagcgcatcgaggcggaacagaatgcactcggacttgaagcggcctcagatgaggtagcggtaggacgagtgcttgtcgccgagtaccgaacgagcctgctcgacgctcgtgtaggtcgtggtgccgtcggtattcttgaagggctcgctgccaagctccgagccgttcgggtcgatcagctcgtcgcgctgagggtgagccgacaacagggcgagggggtcagctcgggtcggaggtcgtctgatcaaagggagggagcgacgcacctcaccgcggtcgcgggcattgttctcgcgcttgagcaaggtcatgagaaggagggcgcagacgatgcccatggcaatgtacccgagcacgactgcgtgaccgagaaggaagcgaggagagtctcgcttgcggtagactgtaaggtaagagagggaagggagaggaagcaagtcagccttagcattgggaggctctgggcatgaccggacgaactgttgctcgagaccaccccgttgatattgccgacggcaatgacggtaccgactgcgaagccgcgcttgtaggcgccctcaaagctgccgctcgcccacgtaattacggccgggatgacggggtagatcccgcatgctgccatgtagatggcgaagtatgagagaccgggcagtgagcgcggagcggctagcaggatgatgtagccgatggcgcctggtagaacgaccagactcaggatcagcgcatgctcaaagggctagacgcaaacgagaagcgcagaacactcaccgacgctcagcaggatgaggatgtagatgccgcgcctttgggtcttggcggcgtaaaagccaaggctgaccgtcactccgcaagcgacgacgtagatcgggaccgagatgaggtttgcgcggacagcagagtagccgagctcctgcagacaatcaggaagccaagtcagtgcatcagtgcagcatacggcagcagagctagaatgtgggccgaaccttgataatggacggtgtgaagagggcaaaggcgtatagaggaccgtcgacgccggcgtaaaggagagcgaaaagatacattttccagtccctcaccgcctgctggagggccgagcccgcaaacttctcgcctgcggccgatgtctggttgtcgcgcttgagccggcggatgacgatggcccgctccgtcacggtcagaaaaccggccgtgtcggggaagttctgaatgagccagaacgacatgacaccagcgacgatggtgattatcccttccagaatgaagatccattgccagtcgtgcaagccgcccaagccgtccatcttggagatgccggcagcgagaaggccaccgaaggcaccggcggcggtcgcggcggagaagaagagcgcagcgcggacgccaaactcggcccgcttgtaccctgctcgtcgcgatggcgaagcaggctgtcagtgcaggcgcagagctcagaatcgggtgggcgcacatacagcatgagaggtagaagttgacgccagggactgaaggttgagggacggccggtcagcgaaggagagggaggcaacgcaaggacgaaagcccactcacaaagaccggcttcagcagcccctagcaggaagcgtacagccatgagctgcccaaagttcttgcagaagccttgtgcgagcatcctgaagagaccccaatcagttcaatggatcggcatgagcaaaagacgggtcggcccgcgtcggacgcacatgatgccccagaggaccataatctgtcaaaccagcgtcagtcctgctgctcttcggcctcgatcgacaggcgccagacgtactgatgaaaggaagatgcgcggggaaaagagcttgacgcagacgttggtgagaggctggaaggagcagcggtcttcagcgcgtgctgcgcgccgcgtgccgcgggaaggagcattgagagcgcacctcaagctaggaagatgcagagcgcggtcagcagacagatatttcattgagcggcagcagtcaggcgcaccagagcatagggaatgactaaggtgaggtcaagctttgtcagaggtcgtgcatggcgaacagaggagcgacgcagcaacgcgcacagaagatggtcaagcagagcaaatactgcctgagtaattcgagagccagaggggcaacgcggtcagggacttgatcgcgacgtgcaaagcggttcgacaaggacgactgactggtccgtcagcttgaggtcggccgataggccgaacgtctgcgcgttgccgatggcctggaggcgagcgaggatcgtcaggtcagcgactgccagtcgaggaaacaagcctgcgcgacagacgacgcaccgtccggtcgaggaagctgagcaggtaaaggacagagagccatgggatgaggacccagtcgatcttccggatgagctatcggcgagcatgtcgaatgggcagtcagcttctggtacagcgcgcaggggtgagacctgacgatagccggcggaccttggcctcgtcaacgtcctcttcgccgggaatatggtcagcctcagcgacgacgacgttctcgagaaactcgttcttgcccttatcggacaggcggtccgtcttgtcgtccatcgcggcggttagagaaatgatgaaggcgctggtagggaagatgagcaggggattgcgatggaagagagcacgacccggtcgtcagctcgggccggtgatctataaggaggcgcccggggtcagcgtgccttgccagctcggccgccttagcgccctctctaggctctcatcgctcaaccttgcacaggggcaggagatggtccggggtcaatcaaagggtcagccacgagggcgtaggccggtcgcgcccgcggccaagaccacgaccgtcgggaccgacgagatcacaaaggaagacgatggcgacaggcgcaggcccatctgtgctctgctaagccgtgccgaccagcagccaaggagcaatgtaagcgcgagtcggcgaccggcggagaaggtgggtctgctgtaggctgaacgagcgacgacgcgggtaggtcgcgccggccatctaaagcaatgtcgtcccgccgccggcgacaacgacagcagaagagcgcgagctgctttgttcagcccggcagctcgtcggccgctggcctgttcacggcggccgatggacccaccggcctgctcgggcgaaagatggtcggtcgtttggctggagagggcggagggaattgaaccaggcccatgacgctctctccgacaaggcctggcctgcacggcgggatcaggcagaacgggtctcgctcgtcgtctgcccttaccttcgactcccacctccacatctacaggaccgcgccgccctctctgccttctccaatctagccatgttccgcacccccttcctcgcccgctcggtcgcccgccgttcgacggccgtccagccgacgaccgcctttacccgccagtacgccatcggcagcaagcagccttcgacggcgacgacccagtcggccgactcgtccatcaagacgccctcgcggccccagtccgagacggtgcgttcctacgagcctgctgcatgcgctcgccctccttagcccccgtgctgacatgccttcgctggctgcaatctgtcctcccatcgcaggctgacgcgcagccgagcgggatggactcgatgccgggctcgagcggtaagggcaactcgttctccaacgccgacggctcgcagcacgctctcaagaagggcgcagagtctgacgaggcccgcgaggtgtcagtcctgcccttctctcctctctcgctttctacctctctcttccctccatcaggggccgaaagagccgatttagaacccaaacggcccctgcttgcttccgctccacagccgcgttggatcaactacgcctctacgagacgcgcactagctgacgaccaacctttccgtctgcagcgtcaagggcccgctcgccgacgccggcgtcgagaccaagcccgagttcaagtagtgtcgacgccgaccgagcgcaaccttcttcccaagcccgttgtacgacccctcctccgcaaccagcaacaacacataccagtaccaaacagagggcaactcgaggccagccctgacgacatgctccttgtagaaacgaacgactctgctccaacagccccgttgtatctgatgctcgctgcactcgatccgccgggagctcaagttgcgcgcgcgcgcgctcagccccggcacaatggggaaatacaagagggcatgccagagggtgtctggtgtctgggcgagaggcgtctagggacgtgatgccttgcgtcttgagcggtcctgggccgatgaggtagaccaccgcccgtcgcccggcgccgcccttgcgaacgacgccgacgcgctgccgtccgcctcgcgtcccttgccatgcggtgccggccggcgaccatccgactcgtcctcttcgacggcgacgccggctgctgagcgccagagccggatgacgcccgcgccagcgagaccccacgcgccgccgacgagcgcgaagccgagcaggaggacgccgagcggcgccaggagcgccaggatgttgtaggcgagccggaacggcaaccagagcagggaaagcgggagggtgacaggcaagaggaggtagtagagcgcggcgaggatgacgggcgagagcaagctgtagattgcgcgaagggccggcaggagcgggccgcctgagggtggattacgtgcgagaaggtcagcgagcgacaccaccgacgccatcaagaccgacgcaccggtcgggttaatctccttatcagcccgctggagaccggccagcttctgcttgatgacccgccgctgcttgttgatgcgctccttggccctggctgcccgcgtgcgccggagcaacggtcgctcgacgttgcgcggatcgtcggcgtcatcgtcgtcctcctcgtcgtcgtcctcactctcgagaccgcccgtcagggaggcctggtaggctttgtcgtcgagcgagcggaggatctcttcaagcgctggtgcgagcggcgccattgtcgcctgctgctggccggcgctcgcggggaggatcgcagcggcgagcggcgtcgaggtcgctgggtccgacagagccgtcggtaccgagacaacagccgtcgtctgagcgctggaagactcgccgttgccgttcgacgggatgaagagccagacggctgggggaggttgcaggagtcttcagatgcgaggagagtcgtgctgcgagccgctcatgtcagaacgcaccgatcggcaggaggaggctccagtagaggagcgacgagagccgtgacggatcgggcggctcggacgaagcagacggccggcgtgtccgctgacgagttgcctgggcttgagacgacatgctgattgaggttgaggtcgagggaggcggtcgtccgtctcgtcgtcatctcgcccgagtctcaaagggttctcacgaaggagctgcccggggcgaacgagttttggcccgcttgcctgtcgaagagacccctttacatccacacccaccctcccgcttcgcagccatgtcagaacttgagcagctcaaggagctcggtcggtcctttttccggcttagtcgttttggagctggagggaggctgacctgcccgcccggtcctcccttcgcggcccgcccgcagtgcccttcctaagcaacgccaacccgcaagtccggcagctcgccctgtccaatctgctcggccacacgctcccgacgtccatctaccgctcggccctctttctcgcgcccgtctcgacgacgggcggcgccggcaagggccccatctggacgctcaagctcctctgccgcgaccagccgatgatcgcccacgacgcgttcaaggcgctcgtcaacctgagcgatgcgacgctcgtcaagaaggagtgctcggacgacgagtttctcgtcttcctcgtttcgtacatcgtcgtgcgtcccggctcctagcttgccggatcttcgggactgcggccgagctagccatcctcattacggccgcagctgaccaacctcgcctcctcccgccctcgcagaacccgacctcggtcctctcttcgctggcagcgatggtcttgtcgaacctgacgtcgtcaccactcatcatctcgtcgctctcgacgctcgtcatcccctttgtcccgctcgtgccgaagccgtcagcaagcccgccccagctggcgacgtactacctgccgagctcacgctgcgcgagcgcgacgccgccggccaacatgccgaccggccaggtcgaggtgacgatcgagtatgtcgcctgcctcggcctgctcgtcgaggcgttctgccagggcgcctacgtcggtgataccgaggaagagatgaagaagaacatccttgcgcggaagggcgactgccatttcctcgcaaccgtcttctcgaatctgtcgacggtgtgactttgcgtattttaccgttctacgagcgtcgctgatcccgttcattttgctcccgccctccagctgccgccgatccggcaagcgctcctctccccggcgccgcaatacccgatccacccagactacacgcagccgtcagtcgacgcccagatcgcgaccgagtcggtcctttcaaagctcctcatctttaccgagcacaaggacacgatccggcgcggcggcgtcctctcgacgctcaagcacgtcgccatgtcggcccagacgcacgctctcctgatcacgcccgaggaggagacagtcaacgtcccgcacctgctcgacaacccgcatacgcggtcgggcccgctgaccgacgtcaaggtccgcggcgtcgacgtcctgcccaagattctcggcccgctcatgggcggcgaggacatcgacatcgacgtgcgttcccttgtgctgcgcaaggataccgtcatcgccaacattaacattgaccttgaatccgttctgacttgcgcgttttcaggagatggagaagctgccggtcatcctccagttccagccgccggagaagcagcgcgagcccgacccggtcctccggctgacgtgcatcgagatcctgctactgctctgcacgagtgcgtcctgccctgttctctgtctgttgttccttggctgacgtcttgtgcgacactactagcgctctcgggccggcagcacctgcgcgacaatggcgcgtacacggtcgtcaagtttgcgcacctcgccgaggccgaccagaaggttcgtcctagcgaacacgcagctccttttcagccatctgcccatactgacgcattttcttccgctcgccgttgcagatcaaggaccagatcacccggctcgtcggcctgatccagcgcgaggagggcgacgagaccaagattgaggaagtcggcggcggagatctcgacatcaagatggccgatgaggaggccgaagagtcggacgacgacatcggcgtcatcgaggtgctctagatgcgaaaaacggagagcagttccgtcagagaagggcgttcgtcgatgtgttccggtcaagcgtcgctcccgtgccctgcgtcggggttcactctgggttcctgaaaatttcgaccgcgagcgtttgggtagaggcgcagcgggccagcgagctcgaagcaactcacgctcgcctcgacctcaaccagacccgacctcctatctctcgaccccgacagctcgctccagcacgtgtctgctcgctctcgagtaatctccctgccaccctccctccgtcacagccgactccccaacgttccaccagcatgcgtcagaagcgggccaaggcgtacaagcgcctgatgcagacctactccctgacgttcggcttccggcaaccgtatcaggtgctcggtccgtcttctcttattcgactgcgagctgccctggatttgagctgacgaactcgtgcgcggctcgtagtcgacgccgaattctgccagacgatcaccaaggcgcaggtcgacgtcgagaagatgctcgagaccgtctgccagggcaagtgcaagccgagtacgtccctgccaccaatctcgcccccgactggctgccagccagcatgctgatgagcagctctcccgtctcgcccgccagtgatcacccagtgctcgatgcaggtcctctacgacctcggccgcgaggcgcaggaggtcgtcgacctcgccaagcgcttcgagcgccggaagtgcaaccaccgcgagcccatcccgaacgacgcgtgcctaacggatgtcattggtaagcttccatcagcagctgactgagcttgcactgaagctggaacgaccgctaacccatcctgcgctcccgctgctcccgctgcaggccccgacaataagcatcgctacgtcctcgcgacccagtcggtcccgctgcggaaccacatgcggagctcggtccccgctctgcctgtgatgcacataaagcggggcgtcactgtcctcgagccgatgagcgacgtcagcgtccggcgcaaggcccaggtgcgcctgactctgctgctcgacagccgctgcgggtcgtggtccagtgctgaccaagtctccgtggcatcttgcagctcgagcagtcagccctccaggaggccaaagccgcggctctgccagcacctcctacgtccctcgcagtcgacatcgtcggcgccgagggtgacgacgatgacgaggaggctgcgctgaagccggcagaggcgcccaagccaaagaagaaggggcccaaggggccgaatccgctctcgcagaagaagaagaaggcggacaagcctgtcgcgaagggcaagggcggcccggcagctggaggagccaagaaagctggcaatgcgggtggcggtgcggcgggtccgtcgaagcgcaagcggtcggccgaggacgaggcgacgccggcaacaaccgcggcgggcgagctgaagcccgacgtcgtcggcgccggtgctgccgccggggagggcgagggccggaagcgcaaaaagcgtaggagacggacggggaaggtcggcgccgagggcggtgctggcgagggcagcggcgcggaaggtgacgacgattaaaggctcttctgtcatgagtcaagggtcggaaggcatacgcagtacatcggtcggggcggcattaaggcagctgccccaagccgtccctggccttcccctcggcgagcaagtcgggcttcttgccccaaggcgcaccagcacccagcatgcctcgtccggctcggcctccgccgcccatgcctcgcccgcctccaccgcgtagactgtcgggcagtgtcggcgcgccgccctgcgcttcggcaggcgccggcttgtcgtcgtcgggcctcggcagctgcttgtagatggcccagagctgggccggcgtcccttgaccggagggagacgcggccgactctgccgacactgggtgagagggtgcgaccgagggcctgcgagtagaggagcagagtcagccgtgcgttgaaaggaaggtgcgccgcgccggacgcacgaccacaggccctgcgagccaggtcggatggccggattgacgccgaacgggtgggcctctgctccgacgatgagggcctcctggtcagcgagctgtcgttcgagcgacatagagcgagtaaaagcgcaggctgaccagtgttcagcacgtagtcgtcgaggctcagcaaggacggatctgcgtgcagcagaaacatgtacttgaacgtctcggcgagggcaaaagactccatgttgtcgatcttgatgcccgaccggcgccggacgtcagcgatgcttgcgatgccgttgtcgacgagcgagttgtccatccaggcggtaaacatctgccagcctttgtcctgccagctcttgtcgccggtcaagcgccacatgtagaagacgctcctgccaagaggtcggcagggtaagtcgatagacgcggagcagggctggagttgacacacgcactcgatcgtctcgggccggttgatgtacttgccgtccgtctctcgcacgcccatcggcttgcccgccggctttttgtacagcagctgctgggccgaatccttgacgtggacaaagcggtcgaggtcgtgctcgccgaaaaaggtgacagcctcggcttggaggccggagtcggtcattgcgccctgccatgagcatgggaagagacgtcagcatccagtaaactgagagaggcgcaaggaatcgaggcctcaccgcatagtagcacgtctgggtaatccgctcggccgtctcgaggtctgtcttgcggtcaaagaggcgagagccaaggccaagcatcgccccgacgaagcaagtcaagtgctcgagccgcggtagaaagcggccaaaattgatctcgccgaagatctagcggagggtggaggtcagcacgtgcatcaagtggttgtgacgggggacgcacgaggaggctttggccggggacgacgtcgatctcctttacaattgtcttgtacgcccggtcgatggattgctcgtactatggcgacacgagaaagcgtgaactcagcaggacgcagtgggccatcggggttcaagaggacgtaccagccgcttgtactgctcggccttcgggccgcgcccgccgagcagctgcgtctgcttgacaaggtactcgtaccatgagtcgctctggccgccaaacgagtaaacgccttcaaggtcgtcagatgagccgggggcgaacgtcgtcggaaagaggggcggatagaggctcttttgcgagagcttttcgtcgagaaagtcggtgacgcgctggacctgcaaaattttcggcaaccgaaagggacggatcgtcagctagcatctttgcggtatgacagaaattgctgcgacgaacgcggttaaagtacgtctggttgccagtcagttgcgaaaggcgggtcatctcgagcgtcatggagccaactgcgggtagacgaattgtgtcagtgtttgacggaacctgctgccacacagtccacagctaagctcgagttgacgcaccctcagcaagagagacgcggtactcggtgccaaaaatgtcgggccgacctggcttgatcgtcgggtacggcagccccgtcggcgtgtcgaacgccggcaggaggatggccgcgagttcctcggctttgtcgagcagaagctgatctccgctgagttcgtagccacccaggagaccgccaaggtacctggtccaggtgaggcccacctctgtcagcatcgatgggtcgtgacccgcgcgcgagagaccggcgtgcgcaccggattgtcgtctcaaacaccccgagctgcggtttccttgggaccttgttatcgccgtgaaaaacttggccatccgtccatgaggcgccgttgacgatgccaaacgagagctggcggacgtgttcgcgggcaagggagaactcagccggcaggtcgagcaagaggagggtgtcgagcgagctgtaattgacgcagaaggtagaaaccacatcagcaaagcagacagcatcacgcggttgggcgggattgacgaagagacttactcgatgatggtcgccccccagccgttgaacggatctgacggcagggtcgacaccggcttgacctcgtcatgcccccacgcatggcgcttgtacgcctcccaagcccagatgaagccgttccggacagcctccctccgcttgcgctccgtctcgctgtctttccaaccgccggggaaggcgtactggacgcgcgcgttggacgggtggagccaggcggtacctatcccgtccgagggcggccgccagtcgcgggcaaaggtcgagctcggcagtccggccgccatcggcggaatgtgcgcgacgtgctcggccgggtagagcctgaaacgaagctctgctgggaagggttcctcgactggtgcgcgtgagtcgagcgcgagagcgagccgaggccagcggctggcaccggcagcaagcgactcaggggagggcgacgagggcggcatgagggccgcaaagtcggggaccacgccgtcccattctccgccttgggtctggacggtcggtataacctcgccgtcaccgtcctggtcttcatcccacacgggacctcgctgatgtgcgctgtccggcgagccgaggaggaagagaaggagcgtgatggcgctcagcgtgagcagggctgaacggggcgcgcgcaggtaggctcgccggccgacgctgaacgcccggaggagcgcttcgacgacgaccatgctggtagagccagacgatcgagggtcaagctgacagtcctcttgagagaggcggcttgcttgcaggtcgaagattgcggtcaagggcgagccaagccgccggaggtgctcgacgcgacgaaggacgagctcgtccgcagcaggcccgacgacatcagcatgcgtcgccgctgacctctcagtcgagctctccaggccccactcgaccgagccatgatgcgcaaaggtcgtaaacgttggtcatgatcaggcgtcatcttctcgggcgatacaacacggtcgtccccggctgctctcctttgcttcggctccgaggccgcgctccgatgcgcgtgcaggtgccggcccgaaggatctcctggccgtgcaggtggtcaggctggtgctgcagaattgatgttgtcaaggagattagaacggcggcaggccgagtggccgaccgttggacgatcgtcctctcgagcgagactgcgagcagacgagtcggcgtcagtcaggaaggtcgacatggagaggccgggttgcgacgcaccgacacggtcagggcctggtgggtcgagcgcgtcagctcgaagccgacgaggaagccgatcgcgaggccgacggctgagcgctggacgatggcggtcggcaggaaatggatcatggcacgcctagttgttgagggcggtcgttcggtcggcaagcgagggggcagggtgatggctgggtgatggtcagccgggtgagggctctcacctcgccctcttatactctgcctgctggaggaagtcagccccgtcggtcccaggaagatgcggaaggcatggtcgagggcaggaagctccaggaactcgccgccgacggctcccggccggcccgcagctgcggaggccgatcgaaaggggccactgccatgctcctcctcctcctcctccttcgacctcgacccgcactcgcagcctacccgatgcttcctcttcggacctcgctcagcatggcatccagctttccgctccgtcgctcgctctcgtcctcacccggtctccgccaggtgctcgacgtcccgctctggatcgacggccgcaacgtcgcctcgagctcgaccttcaccgtccagcacccgcagacgggcgagcccgtcagccgcgtctcgacctgcacgtcttccgagctcgagcagacgctcgcctcgtcttgggccgcctcgcggacctggcgttcgatgcctgccaacgagcgccgcaaggtcctccagcgggtcggcacgcttctcgccgaacgctcggtcgagctccaggcggcctacacgcgcgagacgtcggtcggcccgcttatccgtgcggtcgacatgcaatttgtcgagggccacgtcgccgaggcggctgcgctctgctcgcaggtcaagggcgatgtgccgtcgacggccgatggctcgctcgcgctcgtcctccgcgagccgtacggcccggtgcgtaccctccctcgagcgatctcccgcatcgccaggagctgacggtctgctttcgtcccttcaggtcttctcgatctcgcctttcaactttggctacacgctcgcgatccgaacaatcgtctaccccctcgccacaggaaattcagtcatcctgaagggtcagtcggcgagcccgctcccagacgcgacccgacgctgacgcatgtatgcgctccggccaccctctcatcagcctcgcccctcatcccgcgcacgcactacctcctcggccagctcttcaaggacgccggcctgcccgatggctgcctcaacgtcatccagctcgacgaatcgaccgtcgcggccgacgtcgagcgcgtcatcgccgacgaacgggtccggatggtcaactttaccggctcggagacggttggcaagcggatcggcgagctcgctgggcggcactgcaagtgagtggctgggaagtcttgcttgatgagcgagcgctgaccgtcagcctcgctttaggccggcgctgctcgagctcggcggcaaggccgctgcggtcgtactcgagtcggccgacgtcgatgctgccgctcataccgtgagtctctcctcccctcccaagcaccgtgccctcctccactgacgactgtgcgctctcctacagatcctcttcggctcgcaccttcacagcggccagacgtgcatggtccgtctctcagcttagaacttgccgcaacccaaatctgacctcacccttacccttgcgtccgacaggcgaccgagcgtgcgatcgtcgtcgacgcagtctacgacaagttcctcgccgcgctccgtgacaagaatgagctgctcgcggcggcgctgccggcgacgatggagctctcggccaagggcggagtcgacaaggtccaggcgcttgtcgacgacgcggtcaagaaggtccgttgatgctcggtcctgtcgttcgctcgaaggagcgctcaaatctgacgcgcacccgtctatcacccagggcgcgcggccgctcatggagcttgcgcccgatgcggcaacctcgtcagcggtgccgcacgtcgtcctcgagaacgtcaactcttcggtaaggcctgcgcttttgccgtctcgctcctcccttccgccatcacagctcacttgcgccttcactcgtagatgtcgctcttctctgaggagtcgttcggcccggtcctctcgatcatccgggcgcgcgacgcagcgcacgcggtcgagctagccaacggctcgcgctttggcctctcggcgagcgtctggtcagaggacatcatggccgcgctggcggtcgcgcgcgagctcgagtcgggcgcggtccacatcaactcgacgacagtgcacgacgaggctgcgctgccggtccgtcctctcgctcttgatcagcgacgcttgaagagactgacccgtatgacgaccgcgacttcgcagcacggcggccacaagagctcgggctttggccgtttcaacggcacgtacgcacttgagtcgttcacgcagacgaagacgatcaccctccggccggctggcgggctgccaccgttccacctgcttggctgagagggcgccggtcgagcgacgacgatgaggcgatgcgcgacgatgagacgacaaggcggccttcagcatgcccacacacgatctacgaatctcatgacccctttcctgtcttgctcctgctcgagactgacgctatcacggcgatccgagcgatgacgaccgacgatcgtgcaccgggcattgagaccgagtgaccccttttctggttgtccgaccttcgtttcagcgatgctgctgcgcctcttctttcatgcggtaagctcgaagccttcgctcgctcgctcacgaccgccgtcctccctcccgcctcaacgccacaaaggtgagtaagtgagcatctggtcgccttgcgagacacgcgttccaagaaagcgggaagggcgggtagcagtccatcgcccttcggtcggccgctcggctcgcccacgcggtgcgggcgggtggcggtcaaagcgcccgaccgacgcctccctgacgagaagggtgacaaggcgagcgcagccgtcaggagttgccagcggacgaaaagaggatgcgaatggcctcttgacgacgaccggacctgacccaagtgccccctcctccccctcaccagctttcctcccctacatcttctgccgctccgcctttcctcagctcgagctctccggcccgacgatgcccccggctccctttgtccgaccggaggacctgcccatgtcgcctcctcagtcgctcccaccctcgcctcccaccttcgcacacccgtccttcggcccgaggtcgacgcacgcctttccggcgacgccaggcacgtcggcggtcgacctcaacgccacttttgccggtccgaccggcgatgaggagcggccgttccagtttccggtgcctgagggtcacctctgcgagcctggaacgagcacgagcctcgagcagtcggcagcagccgacgaggaggatgtcgccagcgcgtcgacgcttccacttggctcgcggcgggcctcaccgactggcgccggccgcaagggagtcttccggcaggcgtttttcccgtcgagcttgacgtcctcctccgagaagggacgttccccctctcatggccgctcgtcgtccatctctgctctgcgcaaaagcggcgacggcagctcgagcggaagcggctggcggacccattcgccctccgagtcgctcctcggcctgagcggcatcgctgagctcgtctcaggcgacaagcgaggctcaaggtcgtcacgcaagggcctcgccggtacttcgaattcaggcgaggcgagcgacgccgtacattgggagcacaggcgggcgctgcttccgaccgtgtcgcgtaggggcaagcggctgcttgcgcttgcgggtatgatcttctttgtcctgtgcgtacttgcgatcctccgctgcctgtcgctgccggcctcgttctagactgacctctacttgcagcgttcttgccaagttcgcaccatccgtcgacggatcaacgtcgacgctcattatcaaggttggtccgagtgaaagccgctcaaacgatcgatcgctgatatccctcctctgactctgctccagcgactccgcaagacgccagccaacgccactcacaaagagctcaaaggcgtcgctgcgcgctcctcctcgacagcctcacgtgccagttccgggtcgctcgccggatggacttggggcagaggcgaggagctggcggcactcgttggcgtgcgtctttgactcttctttggctaaaggaaatgagctgatcaagtctgtgcgttccgcttcagttcctcacaagcgaggacacgcacgccattccgccgatggtcgacggctcaactattgacccaggtgcgtcctcgtcttccttttactcaacgtctttgcctctcgttgatcaatttgcgctctgttacagagctcgtcctcgactttgatccgctgcactcgaccgacctcgcgagcgacctgctcgagatgaccgagcacgtctgggcagagcaaccgatcgtcatccttggcctcggccatggcgacccgtgcgtcctcatatcatcatcaagtcctgcccagctgctgaggtcgtttgctgcccctttgttaggcaaacgagagatgtccgcaacatgcttctcagcctgcgcacgcgcccggcgcccacagtcctgctggtcgacacccgaggtgcggcccccttgccctactcgaccgagggtgctgctgacgacctcgcacctttctttacacttcagccgacgccgaccagattgtccctgtccttgagcgcctgactagcaccccgctcgaccagttcccggtcctgttgatcggagggcggaaggtcgacccgaggtgggtcttaagtctctctattcgtccgtaggctggtgctaacgatgtcgccgcctttgcagccgctggcaggctgcggagctgaaggacctggcaatggaggccggcgcgacgttcatcctgccaaagtacgccttgtcctgccccagattgtcgttcagtgtgcttcgactgaccctcgtccgttcgtcctcaggatcaagcggcccgtcccggccaaccccaatcaccagcgctgagcgagccactagttcccgccgcatcccacctacctttctctttcctcctctggacgttgacgactcgccgatcatctccttctgctggcaacggactcatcttcatcttgatctcgctgcgaacccttcccctcgcctggactgccctcacctgttgcaaccctccttccctcccgcactctccctcgcgccccgcaaaagacactcgctctctctcgtctctcttaccctcagtgccgatctcggttgcgcctcttcgcacaagatgccaaccctgtacatcttccgcttcaagggcagcatgagaacgacatgatacacgcccggcagatcccttccgacaggagagcggaggctaggccgcctcctcgtgcaggaggacgtactctcttgacgactggccgaacttgaggactgggcgcgagcgagcgagcgagcggtggcagcgcaacgccatacagtcagcaaccctgcaaccgagcaaagcgcacaagtgaagagagagagcgcgcgcgaactgaccgtccgacgccttgagctcatagtatctcgagggggggatctcgaccccgttgacaaacgacccgttggtcgagtcgaggtcgatcaggaacggcttgaccgccgacgactcgtcgccgaaggcattgcgcgtgcgcgtcaggcgaaactggaggacggcgtgctgtttggaggtcgaggggtgacctagggggacgtcgacgatctgcgagaggggaaagggggggtgatgagttgaggtggtgggcaaggttagggagggagcgaggcggcacgggacgcacggcgctgtcgcggccagcgaggtaggccgactggcgatgaagctgaaaaagctctacaaggttaagcgccgcgctgtcagcccagaacaaaggagcgtggcacgcaagctccgaaagccggtggggggggggggagccaagaagggtctgggcttatgggggaggagcggctgatgagaggggggggtggtcgccaaattcaagtcgaagggctgatcggcaggatgaaggtgtatggaccgagaacagagaacgtcgcggccgaatagttggtctgtgcgctcgatcggtccctaggaccaacgccgggcagctcggccgaagggataggcggcggtgagtggttgaatcggcctgtgcgcgtgatagagccgctccgaaagagcgcctttgccgggccttcgtcctcgcgaccgacatggacgagcgtcgccgactgaacagcaacattggatgcgtcgaagatggaggaagtcgctgaggtcggtcgctgcgggctggcactagcagacggcgggcgtgcagggcgttgcggcagggccagcgccgggacaggaggccgttcaggtccaagcgagtagagcgagaacgaatcgtcttcctctcccgccgccgagggtggcgagggcgacacactccgatacgagccgccaaaggggctcgcatgggatgcgagggcctgctggtgccgaggcgtcactggcgttgtcggatgccgggggaagtcggtaaaggggttctgacgagcggctctggagggcgatggcgtagcgaccggagagagcaggagtgagtggctgacggctggctgagcgaggggagaacgaatactcggcgtcgccgagtaggcggcaggtggcacgctcggaaggccggccaccgccgtcggaggagcgaaagagagttgcgaggtggatgagggcgtagtaggccgactaatgtgtattacattggcgcgctcgatagtcggcgtatcccagagcgccgagttgacggacgaaaaggaaggcgccatcgagttgaaagagagccggtcagattgaacgtcgccggtcgctggcatgccggttgagtggccggctgaggcctggccagatgtatgagagtgaccgcccgccgatacactgctggcaaagacgatcgggatgacgttggtcgattgcgagaggaacgacaggccgtctgtcgagagagccgtctggacagagcgggcatcagaaaagggatcgttggaacgtgagccggccgagtgaaaggcggcattcgcgggccggccaccggtcgggtccaggttgattgacgaggcggtgtaggccttgacggttggtggcagcggagggacaacgaacgtcggcgagtggccgccgtcgcctgaagcagagggctgccgagcgatcaacatcgcgtcggctgagaccgttgtcgagcgtccaacgctcgagctggagagaacgagatttccgtgctctgccatctgaagccgctgagctctcgcctcgagctcctccaggcgacgcaggtctcgagtctgagcacaagaggcatgtagcatgtcagccagtgttcgagcgcagtggcgagctcttcaacgcacccgcttcttacgcagagcccagacgccgaggcagaggctggcgaggacgagcacggccacgatcggtccgacgatgatgccaggatcgaggctgccgcctggctcaggcagctcggggtccttgatgcaagtgttggttgcgcaggttgtctttgtgctgcgagcaggagtcggataatggcgtcagataactgtgggtcgaggcgtgagtggaacgaagggcgaggatggacgtaccgggcagtcgcgacgcaagaccagccagcctcgcaccggcagagcggcgtctgagtcgggcacgtcacgtcccttcgggcgggctgggcgtccatcctagcgaaagggccgggcagtaggcaaagtaggccgtcggtttctgagtctgacgtgttgagatggcagctgggtagtgaggaggagaacgagccgtccagcagcaggagagaagcctgggctcgatcgagtgagctggtgaaaggagcgtcggcgatgaaaggagcgagcgaggtcggtccagcacgggtgagaaagtgtagcgtaggagaagggaacggcgcgacgatcggttcttgcagtggtggtcgtcagccgctcgaggaggcgcctgaggtagacgagctcgagcttggccggcgccgcgaaggctgtttggtggcgacgcgcgaaaagaggcgcggttgatgaaaggggccgcgcagcagctgcaaaggggctctcctttgccgtgcctgcccgtgcctgcccgagccttccgttgcgcttcgcagagcgtcatcaaccttgctcaatgagactcgcttcagctgtcgtatcttgttgcgcgtgtcctgtgtcatgattcgtctctctctctctctccctggtgcagcgcgcccgcgccggcttgcctcgcgcgtgtgcggtcagaccccctctgcccgcctgtcgcacgttcactcgagaccggcaacgagctgctgcgcaatcttgtgtgcgttggcgcgcatcgactcgactgaaagtaaaatggttgaggataggatcagctggccgccgactcagacgaacagacgggcgcgatcgttgcaccttgcagctcaaggttgcggatcttggcccgcgaatcgcggagctcgtcattcagccgcttgatctcgtcgtccttctgcgatgaggaacatggtcagcatgcacagggtgaatggctaggcttcctcgagctagggcgcaccttactgtcggtcgcgccgttgaccggagcaggagcgatcgaagcagccgcctgggtgggctcgctcacaggtgtgccaacctctttcagcgtcgggaaggtccgagcttcatcctcgctgtcgctctcatcggccgcagggacgtcaaggtctttcgcctcaggttcggccgtagtagaagcagcaggcaggatcgcctccttaaccttctcaatcagcgacggctcgggctcggcagcgaccggctttgatggctcaggcgtcgactccttcttgatctctggcggagggagcgtagccgagctcgtcggcggagggaggtttgacttgggcgtctgcggcgcagacttgttgaatgacgatgcaggggcgggcggggccgcgactggcgtcgcgccgtcctcgagcgagataaagttgggctgggccgtcttgcccgagagccactcgtcggccgtcaacgcgggctcggatgagactgccggcggaaagatgtcgctggatgtgggcgcggctaagcgtcagctgaaatgccgaagaggctgacctgcgcatctaaaggggacccacgcctggaagttctcggccttgcgcgggacaatgaatgcgagcggctcaacggtcgagcccgagatcttgtacgcgcgcgcgacctcgttctccgagacatcgagggcccgccgcggaaggaaggtcatgccccgctgggggtccttggcaccaaactcagagaggaagtggaggttgtcattgtcgtactcgtagtagcgaatgttgccgtcgcccttaccggcgacaaagaagatcgagttggcgtcgttgtagaacggcatgagaacgcccgacgactgatcgatcgtcaagctcttgacttcggtcaggcctccagtctcccagaccttgacctggcgctcggactgccggctgaactacgatgggcgcagaacgtgccaggtcggcacgagtcagcgctccagcctgtacaacgcccaagggataagagagtgagggaacgcacgccagtcgtcgcgatacggtcgtggcctccgagccagacgacacgcgagcccttgacgccggcgtgaccgtcggcgatgcggacaggggcagtgccagcgcgcgggtcgaagatgcgcagctttttgtcgcgcgaggtctggaagcgaggcagggcattgacggaatcagcttctgactggaagaagcgtagttggcaactgcgaggtggcgcaccgtcgcgagcagggtgcccgtctggttccaggtcaggccctggatggtttcgtcatgcgcgtcgagcgagatcttgggcccgccgcccgagttctcgatatcgaagacgcggacgatgtggtcgcccgatgcgacagcgaggacgttgcttgccgtcgggtggaacagcagctggccagctttgcggccgccggcgttgatcttggtctcgggctcccagtcgcgcggcgtccacttgtcgtcaccccagagcgcaaagtcgtcgtcggcgactttaaaaacgcagaccttgccgtcctcgccggccgaggcgacgatcgagtcgtcaaagggcgaccaggctgtgtcgagcacgggagccgagtggcctcgggcgagaggaaggatgtcgggcactttagaaggcacggagggcgcgccggccaggttcgaacctgcgccgaagggcgacaggagcggcaggatcgcaaacgcgccgccgcccgagacgttccagttgatcgagaggtatttctaggaaggcgtgtcggcggtcagagctcgctgtcaacctcacgcgaggctgcagggctggtaagagggggagagaggacgcacgccgccggccgcgatgaggttggtgtcccaggccgagcccgagaccttgacattctcgtacgagttctccttctttggcttgtcggcaaagacgtgcctgagacgcatcagcccaagtgggagctcggagtcagctagggcagctcaaggagggatgccacgagctgtggcagctgaggcttggcctcgagatggcgagatccgcacctgtacttgctctgtctacgagccgaggtcaaaggagagccgtcagctcaacgctcggcaacatcagagccgctctgcaggacagactaacctcatgaagcgcgacatgatggctgacgagggcgcggcgagagtaggggcggcggagaaggaacgttcggagcgaggagatggcgggctggcgcagctgagcgaccaacgcgtctacgcgcgtgcgggcggcgggccgttcgtctcgtcggctgagacagaaggcacttgcgatgcttcgcagaagaggatgcatccgatccctgtctaatcgcaggtcgtcaaagctgacaaggtcatgatgatgtcgaccctctccagcccccgctggtcggcctactgcctagccttcttgccatcagcgacactctcggccgccgccgctgccgtcggttccggcgccttgcgcttcttgcgaacgacgttgccgctgagctcgttgaccgtccccgcctggcgctcggcctcggtgatcggcttgaaggcgttggtcgcgctcgtcgaggccgtcgcgctcgtcgtcgccaggagcgccggaaggccggtcgtcattgccggcgccaggcggaggtcctcgatctgagcgcagagtcgatagagcgcaatcgaaggtcagaaagacgcagcacagtcgcgtcgcacgcaaggcagtgcgcgcaccttgaggtcgaggtcctccatcagctcgcaaatgttgtcaatctccttctgcgcggccggcccaccctgtttctcaagctccgctacgcgcaagaccaggctcgccttactctgctcgacctcaccgaccgttcgctcgcgggcgcccggcgtcgggtcaaactcgagcgccatcgcgagcttgaggtgggcctcggacagctcgcgcgacgacggcgggaggagggccgacttaatcgcaagtgacgaggtaaagtcgagcgtcgcctgcgcaaagttttctggatagggaggcgaagggaagggtatcagcgctaggcagaaaggtagcgcgtagaaggacgcccgacgggtccacgacaagttgcaggagaggacgtacctgtctcgagcgagacgtcgccgagcgtgaggaagcactctgcctcactcaaccgtgcctcgtcgccctccatcttcgagaagagcgtccgagcagcgtctaggacctcccacgcggcgttgaagtcgtcctcgggcgcctcgtcgacatcgtctgcgccggtggcctcagcgccgtctgcccggtcattggcggccgagccggagccagagccagatgcgaccggctgttgctcctctgcgagatgcacgtgcgtcgagagattcgaggccttgctggcgactgcagcgagcagggcttgaggttcagcatcgtagtggcggccggcaagaacggagggtcggcgtgatcgcaaaggcgagcgacagcctgaagcaaggtagacgtactcgacttgacatcttcctcaccctcgttgccgttcgcgtcctcgccgtcggctccctcgccctcgtcgctgtcgacgtctcccggtcccgagcctgcgccacccgaggcgcgcatgacctcgttcgaggcgatgccgagctcgaggagcgtcttgccgtaggcgagcaggacgtcagccgactcgggcgagaagtcgccgtggacctttgcactgcgaagggcgaacaccgtcgcgcgatgggaggtcagctctcgtagcgaggggagttcgagctcggggggccggtgaggcggggacgtacagctcctcgagcgcgcaggtgaagctctcggcggcctgctcgtagctccggctcttgtagtgggcgttgccctgggtgatgtgtgcgtcggccatgttctgcaaaggtgattggggtgcgggaaagggtcgggctgagtgcggttagggtcgagggcgcgctgctcgacagacagacgcgtcgttgcgcgtcggcaggccggagaggggcaagtcacgctgccatagcgacgaccatgctcgtacgccgttgccgcaccctacccccttcgacctcttgcacatttaaacagagctgtcacagtccgagcggtcagacgagatgcgagggttgctcgagtatagacgacgacttcaccggcggacgacgacgaaagtcgattgacccttaccgccattcgctgagagccgcgctctggcgcctgactgtcgccacactcgcagccgccgagcgagtccggctacgtcttgtcccgaccacccaacgcccacaccctccgaccctctcgacgccatgtggtcagctctccgtcgcccgctcgccctgccgatagcctcgacttcacgcctgccggtcgtcgctcgccggccgctcgttgcccggcgcttccttgcctcgaccctcccccgcctgagctcgtcggacgagggcgaaggcgagttcccgccggcgtcgcccgaccgggccgaggacgacgtcgatgtctgcattgtcggcgccggtccggctggtctctgcgcggccatcagactcaagcagctcgagctcgccaacccgggcggcgaggagcggcgcgtcatcgtcctcgagaagggcgcggaggtcggcagccacatcctcagtggcgccgtcatcgagaccaaggcgctcgacgagctgctgcccaactggaaggagctcggtgcaccggtaggtcctctttcttctaatctggtccactcggccgagctgacgacgtcttctcgatccggcagatcacgcaaatggcgacctcgagcaagatgcgctacctcctgccaaactcgtccttcccgatcccgcatccgccgcagatgggcaacgacggcaactacattgtctcactctcgcgcgtgacggcctggctggccgagcaggctgaggcgctcggcgtcgagatttacgccggctttgcgggcgctaggcttctctacgacgagcacggcgccgtcgccggtgtcggcacgaacgacgtcggcctcgacaaggagggccggatgaaggactcgtacgagcccggcatggacttccgggccaaggtgacgctcctctccgagggcgcccacggctcgctctcgaagcaggcaatgcagcgcttcgacctccgcaaggactgcgacccgcagacgtacggcctcgggctcaaggaggtctggcgcgtccgcgaggatgcgtacgaggcgggcaaggtcggccacacgctcggctggccgatcgacaatgcgacctacggcggcggctgggagtaccacatggagggcggcctcgtctcgctcggcctcgtcatcgcgctcgactacaccaacccctacctgagcccgtacaaggagttccaggtgcaattgcagctttcgctccagtcctcctggagcttaccttgctaacatttcctctgtcgctgattcacagcgcatgaagcaccacccttacttcgccaagctgctcgagggcggcgagtgccttgcctacggaggttagctccaagtcttcagctggatgctctgctttcctgatgctgacagtccataattaccccctcagcgcgcgtgctgaacgagggcggcctccagtcgataccgaagctgcatttccccggcggcgcccttctcggctgctcggctggtgcgtctcgctcttcagtaactagctctcctgcgctgcaagctgacctcgcgaccctctctccgctttctcaggcttcgttaacgtccccaagatcaagggtacgcataacgcgatgaagtccggcatgctcgcggccgagtcggccttcgctgcgctttcgaccccggcggtcgaggcaggtgaggtggctgccgacttgtcatcgtacgagacgggcgtgaaggagtcgtggatctggaaggagctctacgaggtccgcaacgtccggccgtcgttccacaacccgttcggcaacctcggcggcatcatctactcgggcatcgacacgctcctgctcaagggtcggacgccgtggacgttccgcaacaagatccaggaccacgaggcgacgctcaaggcttcgtgcgtctccgtttcgggctcgtctcgtcgcggcttgtccgactgaccctcctttgctctttgctcctcgccgacccgcagcgagtgcaagccgatcgactacccggcaccggacggcaagctgtcgttcgacattctgacctcggtctcgcttaccaacacgaatcacgccgagaaccagccgatccaccttcgcctgcctgagacgcccggcgccaaggctgcccatacggcggctaacgtcggcgagtatgctggcttgctcggtcgcgtctgtccagctgccgtctacgagtatgtcgacgccgagggcgccgacgcagacgccgagggcaagaaatttgtcatcaactcgcagaactgcagtgcgtcgtcatcgtctcccgacattcttggccgccctgcgtccgctgctgataatgacgcgctctcagttcactgcaagacctgctcgatcaagacgccgacgcaggatatcacatggaccgtgccggaaggcggcggtggccccaagtacagtgaattcgcatcgagtctcccagcgcgagcttgaactcggctgacttcctgaaacgactccctctactttgcctgcgatagaccttacgtagggcggccgtccctggtcatctgctatagagcgacgccgtctcctactctatcctgtgacacccgccctaattcgatggcctggacccaaaagtcgtagcagagaaggcggcggaagcgggtttttgcacgctgataaaagctcaacagagtcgttgggcggtagaccatgaatcgtcacgctctctactacctcactgacccgtgtaccgcgtcagccgggcggcctcggcccgcacgcgctcgtcccagtgccggctctcgagcaaggcgagctcgtagaagctgccggcgaacgggttcgacacctgcgggtcatcgacgtcggcccggtagacgccgtcggccgtccggtcgtccgagcagagaagcgcctcaaccttgggctcgcgcacgagcagctgcttgacaaagtcgagcgagcgcagggccgacgccggcgggaactggagcgccgacgtcaggagccgcttggcaaaggcggccgaccgccacggcggcgaggatgcgtgcgaggcgtagggcgaaaagaagacaagcgaaagcgcccggaagagcaggtcggccgacggcgagagctgcgactttttgtggaggacgcgcgcgcccgaggcgttgagcgaggtgagcgtcgtcgtcgacaccggcacttcctcgagccgggggtcaaacgacagatgcggcaggacgccatacaggtcggtgatgaagtcggacaaatcaatgttgagcgcctcgcctaaaggaagaaacaggaatcagccatgagcgaaaatgtttgccgcgggtcgcgttcgacgcaccctgaccgctcagcagctcgaaggcggtgacgatggcgagcagccgcagccgcgtcttgtcctcggcaccgcgaccggcgccccagccctgggtgtcgagcgtctcgtcctccgagtcctcagcgtcgacgagctcgtcgagccggtcgcccttgacgatcattcggaggacgccgagcaggtcgcggaagaagtcgacgttgacgaggtgggcgaaccgggcgaggccctcgagcgcggccggaaggagcggcgtccggcgcgtctgcttgaggatcgaaaagtagaggacgaagaggtgctggagcgtctcggtctggttccggttagcctcctcctcgtcgacctcggcaccggcctcgtccatctccttctcgatcgccttcttctccttcatgtccttgcgcatcttcttggtccgccactcgcgcttcttctcggcccactcgccgccctgctcgtaggccgtccgctccttgttgacgcccttgccgcgctcggccttctttttccagtcgcggtccttgtcccagcggcgcttgtgcggcgccgacgattccttattaggcgcggcccggaccttgacgtgccaaaggcaagaaaggacgttcgggtggacgttgaaatgccgctccttgatcatccggttgaggagccggacgagtggaagcgagtgagtcgacgacatgtcggtctggaagatcgtcgtgatggcctgaaggcaaatgtcggactcctgggagacaaagcagcagaaagagggtaaggaaggagaggcatgagtcagtggacgacaacaagtatgccgacgcagcagcacggacagcatcccatgagcgccgcgacaaccggccgacgatgacggccataatgttgtcgcggaagttgaagtgaggcacggccgttaaaagctcgcacatgcagcgcagggcgagccctgcgagctgactcttggctgtcagagggaaagcgtgaggcgagatggaagggtcagcgtcggccgtttcacaaacggatcttcgtgtcggcacggacccttgacctcgcgctcgagcatcttgaggtagccggcgtaagcgcggacgaggccggcctcgccgtcgcgcagcctgcggacctcctcacggaccttctcggcctcctcggccgccgtcagctcacggatccggtatcccgggatgacgtccttgaagacggcgagaagcgacatgatggccagcgcccgaatcgagaccgggttggtgatcttgggcgctgcgggctccggattggggacgttcgcgaagccgaaagcggacagccgactgaggagcggaagctgcggcgatagtaggaaaagggtggcaagcggtcagccagaagggcgacgaagcaccgactgcaggttccgaggggcacgtacgttgtcgacaagctcgccaccagcgacgatctctgctccgaggccggcaatctgctccttggcgacctgcctccgctcagccgggtttttgatacggacgacgtcggcgacggcaagccgaccccagcgggtgccaagacctgcgccctcgggctggtagcgcggtgccgtccactcctcctccggctccgaggccgactcgtcgtccgagtcgcccttgcgacccgacgtctgcttcggaagaatcgtctcaccctcgcgggcctggagctggcccgaggcgagcttaatcggcagccgcttgacaacgttggcgccaacctcgtctggatcaatcgcgcccttgcgggccttccgctcgaacgcagcctcctgctcgcgaacctggcgcttgcgcttcttccttgacgggtcgtccgggtcggccagggcgccgacggaggtcaggaatgacggaccgcccgaggccgagcccttgaggagggcgagcaggtcgtcgtcctgcgggaggtcggcgtggtcgtcgtccgagttcgagtagtcggacattgctggaggaggcacccgggcggagctctggggtggaggagaggagcgctcgaagctgaggagctcgagtcgaacggatagcctggagctatacgagctggttcgcgttctaggaagccttctgagagctaggctgaagagaggcgagcaaaggaagtggtcggcaggctcaggggagcaggtcgagcaggcgcaggcgggttcgtccgccgcaatcgaaatccgcgcggcggtgtgacgcgtaaagcccgacccgtgatcgagcctcgtaacccactagtactctcggggtgcacttgcaggcagcctgcgggcagtcgagcaagggcatgcttcgagacggttcacgaggtcgagggcgagagacggtggagacgactgagtcgaatcgcaggctcagcccgcacaacggttgcccatcaagccacgtcctcccagcctcccgcgccgagccggtagctcgcctcgccctcgggcatgtcgggcgagtcgacaaccttggcgatccgctcgtcggctcggcccttgcggagagcgatccgcgtcgccgaggcatgcgagaggacgtggccgccgaccggctgtcaaggcggaggatgcaggatcaggatcgtcagaccgcgcgcgcaacagggctgacacccgggcggggacgtactttggccgacgaggcgctggcaaacatgagctgggcgcccgggtcggcctggacctacagaggtcattccgagtgggctgagaatcgtcagcgagagggcgtatcgacatcttgagcgacgctgacgcacctgattcgtcatgaggacgcagatgttgtactcggagctgatctgcggttccagggcgcctagacgcattaacagcagtgtctcggcgatcgccatcttccagcgacgtaccttgctaagccgagagagcatctgattgagcttctgctgccgctcagagagctcgccacggccgctgtagtcctggcggaagaggttgatgaccgagtcgatctggcggcgccgcgcaagaggttagccgtcagcgcagcctctgctgtgcgcgaaattcggaggacatacgatgagcagccggtagttgccgtcgtcggagaaccggagggcaagctcgttaatgagctcgagtctgtcgcgagcgagcggacgaggacgtcagtcgatagggcagaagggagcaaatccagcctgggacggaactgctgctccgagttgtacgcccggcagtagaggatgttttggagcgccgtctcgccgtcgacgcctgcgtgctcggcgatcgtctgcaagcgaccaaggaggttgagctggagcagggcagatcgggacgtcaacggcgtgcactcacccgaacgcggtcgtcgcggaaggtgccttcggtgtcgaggtaggcgacctctagagaacgtccaggcgtgcgagtcagcgatcgcagaccggcctgatcgactgacgaagggcacgaactgccggcgccgcctcccatctcaatcgggagctgggcctgaatgcagagtgtgtgtgcgagctgcgtcttgcctgtacggaactcgccgtagacttcggtgaccgactgggtcgagatgcccccgccgaggatctgtgtttattacgcaagagaggtgtcagaggcagttgcagcgagagacggagagggcaagcgagtcaacccacagcgtcgaccgccttactgccggtgctgatgcggacgaccgacttgcgcatctcagaaacctcggtcgccgacatgatcgccgacggcagaacccggacggcaacctccttgagcttctcgaccttggcttcggagaggcccttgaaagtcagaagggcaggcgatcagtccatagggccagcagacgcgaggtcgcgttgcatcgagcgccgtcaggaggtaccttgatcttgagcagcgagcgactgacgcagcagagcaagcacgaagagcgtcagattccgatcttgtcgaaagggtgcttggagagagagagggacgcaccgaggcgtcatcctgagtgcgcatacacccatgatcagctcgactgacagcctgcgcgcgcctcacgcaacagctgtgcacgcactggaccgcctggacagttgttaggccattggccttgagctttgcgatgtcctgtgcgttaatgccctggagtagcagcgacgagggaggagcaggcggagggcacggccacaccggtcagcacgagtgcccgcttgtcgcaagacagcaaggcagaacgggtgggacggcacatgtgacctgctcggaaagcgagaaagagaggtcaggacatgcaagggcgggtggatagagaggccgagacgtactgcatctcgtcgatgtgaacgaagaagagcggggcctcctgcgggtgccgattgtcaagatcagcatcgcagccacggacgagccccagtggacgtgacgagtgcagacctcctcttcaatgtcggacatggtggtgggctgttagagatacgaaagagttggaaagtgctgtaagaatgggatgctgggtggagggaggaggacgtcgtcgcgcctctgccggtcgccgctgccgcgcagccgtgcgcagccgaccgctccgatcaaagagtcggcgtagagcagcctccgaacagatgcgagtgcgtctgtgcaactgcaggatgagcatcaggtcagacctgggcgagcgcagtcggcgcgctccggcaggctagttgcgagtcagccatccggtcagccagccgacttgatgattctactctcgaccgcccgtctcggaaatctggtatggatacaaactgcatcgacaggctgccgcatgctgacaggacagacgcaaagccaaagacgtctagaggaagctccggatgcgctgactgatgtcgagcccgtcccgctcgctcaggtacccgctccgggcgtccgtctcgcccctgagcatctcgcgatggctcggaggcgaacgctggagctcggccgccgtccaatcggcgaccgtgcgcatggacctcgaggacggtttggacgagcgcggggcggaaggaggagtgtgtgatgagggggcggggatgagatgaaagtgcgcgtgaaagactgcttgcgcgtagccctgattgagcactacgttgagatcatcgttgcaggtcgctgcggaggcgatcaagagaggaagtaaacataggacgatacagaggtcagcgctctcctggcttgacgtgctgcgcactgctaggtcggaagcctacgatcggaccgacccaccttttgtgatggcctttgtgatctgcgggatggccgcaccgatgcttgcaccgacctgaggattaaggtctgagatccgaggacaatgggttctgtggcaaaggtgatcgagagcagcaggcgaggaggcggcaaagacgtcagccgccggcctcgcagccgaagcattgggcaaaaacgtacttcgggatgagcagcgtgtgacctggccggattggcatgaggtctgcgagacaggctgtcagcgcctgcattaacgataacgaatgggctaggagcctgatgcgacgggagggcagcctgcgcacgcacccagaaaggcgatcgtctggtcgtcctcccagacgatgtagcctttgccttggcccttgacgatcctacagaatgcacagctggcatcgtagttgagcggtaagggagtcctgccagcgccgagggccgtcgtcgcggactgggcggccggggaggaggacgaggaggaggaagcagtgggctgagcagatgtggcggcggcggtcgagcgatcggccgtcggctggtcggcggcggcagagccgtttatggaggaggacgcgccgtctgcactcgtccaggatgggtggatcgtcctgccgacgtgcgctgcgatctggtacgaggtcatccgagggcgtcgagagctgtacaagtaggtgggagtcggacgagcgagagctacgacagcacggtcagcacctccggcccgccagaggaggcgcagcggcccaccgccgtttcgacggaaccgccagccttcgcgtcccggactgagcttgcacagaatacccatctgcagcaggacggccagggcagctgtactggacaggctggaggacgtcgagctgtactcgtgcagattacgcggctcgtttcgggccgtaccctttcccgtcacaccgtcgcgcaggctctgcatctgactcgatgtcaataggacaaactcgagtttgactgtcgcgagtgcatacaggtgccttcctaaccatgagctaggaaggagagcgaggcgcgatcttgttgcattgaaaaggtcatgacgagtcgctcggccaggagcagcggctgtcggccgcggcgcgtccgtgttgctcgagcggctgcgcccactcgtctcctgtcacccaactcccagaaccgtccccatccatccagccaggatggatcccccgccggcccgaagaaaggtacggacctactactgtcgccccaccgagctctgcaagctgacattgatgcgatgggcacgccagatcgtggggtccatccagcggacgacgtcggcctcctcgcccaccccttcgtcctctgcgagctcaacccccgctcgaccgacacgcccgccgctggcgacacagtcctcgcccgtctcctcgacatacatcgccagatcgcgcacggcgacaaacctgagcggcaccaccgtcaaggcgcgcgtcaaggtcacgagtggcgcctccttcgccgacgggtccgggcccgccctcgccccacctgcctcgccctcagctggctgcagctggagtgacgcagggagtgatgtcggctcggccgtcggctcgggcgcaggcccaagtctgacgggacgcagagctcccagtccggtttcaacctttggcaacggcccagcccggttggtcgtgacgggctcccctcgcgttgtcggctcagccgtcagcagcagcgctcgaccgggtcaggtccacgcccgatccagccccatcgcgccgactgccggctcgaagcaaggctcagctggtccaccgaaacatgtccgatcaaattcggccggactcaacgccctatcaccctcgatatcgtcgccggcgagccggtcagggacgccaaacctcccttcgtcggcactctctgcctctatctcctctcggccgctgacggcatccgtccgagcggcgccgtctactgttcgcggcttgccctcggcatccgccccgtcgacgcccttttaccaggcccagtcgcaggctttcctgggtacctcgagcagccggtcgccgcctccgccggctgaacgcggctcgggcgccgagtcgccaccgcagtacttcagtcagcagcgctcggcatccatcccccaggatcgctacctgtcctactcgcctccgccaacgctcgcacccttgccagcgcagcctgcagagcccgtcccgagctccggtccggtcgccggtggccttccagctagcacgcccgatcggcggagcgtcggtagtctggaggcccgccgttcgtcgacttcatcttccttctcgtcctcggactcgcccgactcgcgattctcgccctcggccggctcggctctctcgcagccggtctcgacctcgtctttctcgagtgtgtcgtacgacccgccgccggtttctccaggcttcctcaatggcctgccctcaataccgtcagcctcatgtctcgacgtaacctctcgaagtccgcaagagacgatcaagctgtcgttggccaaccgggtcgatggcttcgacgtcgagatcccgccagaggaggacccgctgagcaaacaagaggagaaggatgccaaggtcaaccgcaaggtgtgttcagtccatccagtgttgcggccgtctgctgagtgagccgctcccgcgtccttacgcagatcgccgacctcgagatctcaaacgccagcctcttggccgtcaaccactcgctcgaggctgcgaaggccaagcaaggcacgttcctgccttccgatgcagacacgcactttgctgactgatgcggcctacctcgacatacagctcgcgagattcgcgatctgcgccgacgcttccgctcggggaccaacctgccgccgccgcttcgtcggtcgtcgtcctcgcggcactcgttcggccgctcgcggtcgtcatcgcattcgtcgcagagcttatcttcggacgagacctcggatggcgacgacgaccaggccgaggaggacgaccctcagttcgcccggatgaaggaggtcatgctgtcgatgctcgagaagggcatgagcgcgctcgccgtcaaggtccccgagccgagcggctggggccgtagtgtcggcggcggcggcggccgagtgctcggcatcctcgagatgggcgagtggcgcgagaaggaaggagctgaaggcgaggacgacgaggccgagagcggcacgccttcgcctcggccggagacggcggtcgagccggcgaccgacgagatgatgggggcctgagcggcctccctgtacaaccaatcgctcgagacgacacttcacgacccggccgccgcgcccacgactctttgcactctgaaccgcactactctaccgcaccctgcttgtgagtcgggcccgccagttggcttcagtcgaccgattgcgaggctgacatcttttccctttccaccagaagattactatttcatgtccgcacagagctttttccttggctaacctagtggcgtgcagggctgtccgtctgagaagcacagttggccgctgatctcgagcaggtgtgtttcgtgaaaagacaataggcacaggggtgaaaggctggcggcggccgcgcgaccgagcctcgtcggcgcagcaggccgacaggagcgaccgcccgacgtcacgtccttgattccctcgagagccatcagctcgcagccgccttcacccagagcatcatccccaagccctccgctgcgctgatgcaggtacgtcttgctgtctctgcagcttgtctcgatcgaatgctcggagggagggccccgagccgatcacgcgcgcccctgcctgtcgcctcctctgttcgagctacagccctcccagcgcccctcatacagtccgactcgctgccttccatcttctcccgccgctgcctctgcgtctcctttgccggcgtccacttcagggtcagcaactacgtcggcggtcaaagtcgagcacgactcgaatgaagcccttgtcccttggtcgccgtcaccagaagcctcccacccggcgagcccggcacacccgcagacttttggcgcaacggacatctttgctgccctccggtccaactggacagcggctcgtcccaccaagccggccgtcgacagtcgcaaacgcagtagccaagacgatgacgcgccgcgaagcaagcgggcacgcatctcggccgagaacgacgtgccagacgaagcgtgtgcgtctcgatctgctatggatcagaggcgaggcgactgactttctctgccgatcttatcagcaggtagatcgctttgaaggggctaggatctcaacctcgggtcactccctcttctgttcaccgggcgttcctcctcgcttcgtgcggccgctcttgcgccagctcccatctgtccaacatcctccatcgtctgttgtccctcctctcgacgtcagcacttgatcagcgcagtgagggccgtcggatgggttggggcaagtgcacctggtcgtgagtccttgggcctgcgcgtggggaccccgcgccttgcgccagccttcgtcgacgcactccggcccaccgcctcttgctttccctttcaaccacgaccttccttccgtcctcgttgctcaaaggcgtcgctccttgcccgacaagacgcgccttctgctcgcccagccgacaatgttcgagatgccggtgcgtctccgccctcgaaccgctcggccagccagcctccgggtcgagctctgaccccttttgttccggtcgaccaacccagcagtcggcttcgagcggcgcacaaaccgccgtcgcctctgatcaggtacaatcgagcacggcgtcgaccaacaagcagctcggaccgaccctcaggtcatcgtcaaagggcggagcttcgccgcctgcggcgggtagtgaggccgagccagccatctcggcagcggcagcggcgagctcaaacggccgggcccgcagccggacggcattgaagtctggctcccggcgggacgctttgggacctgaagctgggtgccttcggctgccgagcaggaagactagcagcgaggttgcgagctacaccatcgaaggcgtcaagggcattggcggctcatcgtcagtctcctgtcgcaggctgcgctgctgcgtttcagcctcgccgtctcaactgacgcccttgctgcttgaccaccttcgggcgcgttttcgtcggctacgcttcagatcgcgccaaggttgcgattaagcgctgcatcctcgatgatgccaccagcgccgtacgtcttctctcgctgaaagccaggggccggcagctcctgacgtcagtgcaactcctttccctccgacccaagacgtcggacaagaccaagcgcgagctcaagctccttcacaagggccggtaccagaacataatcgccctgctttcgcccaaggttaaaggtgtgtcgatagtctcgtgctcctgtcatcctcgatgtctgtcgaggcctgctgaccacgtgctgctgttctagtcgacggcgcggggcaccgcggccaggtcttcttcgtcttcccctacattgagcacgaccttgcagccctcctcgccgaaggaggtgacgtactctgggacctgtcgaccgtcaagctgttggcgcagtagctcgtagcggccatcgctcatttgcacaaggtccgacttgacgctggcggtcagtcgtgatcgtcctccttttgctgacttccacatgtacgctccagcacgacatcctcgaccgcaacatcgagccgacaaacatcctcgtgaggtcagaaacgacgaagtcctcaagctctgtggctttgggtccgcccggagtgccgtcggcggctcgtacgagacggtccacacccagctcgacctgccggctcactcgctgctgcggtggtacaagccttcggagctgatgctcggcttcctcaagcttagggtcgtcatgtacgtctgggcacttgggtgagctcgtctgggctgctctagaggcctagaggtcctgcaatggcagacgcgcggcccttgcacggcagatgcgtcgtcggccagatggccacgaagcgaccggttctgcctggttccacagacgcgcatcaactgcggctgatctggcagctttgcggccgcctgacgacgaagcgatttctcgattggaatcggtacggcggctgcccgggggacgacggaggcgcttcgcccggcgagcacgcctcgcagttccacaccgcgccttacagctcgtgcgctctttgctgggctttggcgtcttgagtcaaggctgacgtgcggatttcgtctgccgttcatggctgcgacctctcgctcggccggctgtcagcgcgtgcctcagcctggacccgaccgaccgaccgaccgacggccagcaatcttctcgaccacgagttcctcgtcttcacgacggcatctgcggcgaactcgtacgtccagcactcgatctgacacgcgagcagcacgagctgaccgaggcgagatcacgcttccagacttttgtggcagggctcgtcacactcaggcccccggaggaccgacgccagtccctcggcccagcagtcggcaactcatcctcctcgtccgccatcacactcagtttcctcgttctctcgcccggcaggcccatagcctcgggtcccgccacccgcgagcaaggcgagcagcaaagtccggtcagaggatgtcatcgtcatcgacagagacgatgaaagcgaggaggagcagcctgatccacaaagcgtcctcctcgaccttctcagagcaacaaacgtcgagcaggcgccggtcacggcccgcagacgaccgacgagatccgctccaacaccgagaagcaggcagctcagctgaaagacgtcgagttgttcatggccggcctgtcggcggccaaggacgaggtcgacgccctgaccacagaggtggagcggcacaagcccgacgctgtggctctcaccgacgcgctcgtcgagatcaagacgctgtcgaccgagatccacaagcgcaacgctgccatctacttcctcgagctcgacatcgccaagaagcagaaggagctcgaggcacgctcattcgaagcctaccgcgatggcaagattaaggccctcgagggcaagcttgcgcagctgaagacgaacctcgaggaggagcagaagtacgttccagtagactatcgatgtcttcaagcttccgctggaccggttacgctctctcaggacgaataaggtcttaggacgaagaagggtctccgcgccgaggttgcgacgaccaatcaggtgacagtcgacctgtcggcgcaggtcaaggcgtccaaggagcaacagacgtacgtctctatcctcgttgcatcttgcacgcgagctgactcgtggctctactcttgcttccagacgaacgacaatcgacctgcaggcaaaggcgtacgaggaggtcaaggcagtgtgcgcagcatcacaggcgttgctcaggtgagtctcttgcgcttgttgggcaggacttggcttcggagactgactgcattgtcgagtccttgcgatactggcgccaagcagcagtcgatccaagcgcttgaggtcgaggtcgtgtcgctccgggggctggtcaccgagagcgacgcgcaagtggcgacagccttgactgagcgcgatacctcccgccgcgcactctacgaatcgaccgtcgagctggagcaagcgcaggctcggatcgagtgcgttctgtccacctttgccattcaaggcgggaagctgacgaaatgacctcctctactcaacaggctgctcgaaggccttcgcacgtcggacgtttccgtcgcactcgcagccagcatcgacaaccgtgcgtcagtcgatgctaagccccttcgcttcaattctgtcccttccaagcgcaaggccaacgacgatcctgctgcggcatggagcctgtcgagcaagaggccacgcgaggacggacccaacgacggcgacaagcagcatgcgcccgccgcccttgctgaccccgctgccggtcttgacgacggcaaagagcaggacacagatggctgcgtcatcacttaaggtgcgtcaatcatccatgtctcgatcatttgagcgagaactgacctgccgaaagccagcgctcgcctggtcatttcgcttgactacacccccggtcactcttaggcggccctgctgtcggccccttgttctctcacgcttgatcacgatcttccgatgctcatgactctgtaacacacgactgactgcgctagctgcgacgtttagtacaaagtcatcagaacagagccagaagaaccgtcccaagctgcgtcactcttcgcgctcgtccccctcggaggaccgcagctcgcgtgctgcccgcttcctgagcccttccagccggcctagaaggccacactcttcgccctcggcaagcaagccgagctcccgctcctcgcgcacgccctcctgaagcgtgtcgagcgtgctctggaaaaggccgagcgccgaggccggcatgccgaagaagtgtgacagctttttggccgcctgtcggcgccgagcgacgtccgactgcagcgaagcctcctggcccggcggcgacatcaggccgggggcctcgtcctttggcgaagagtcagcgccgtcgtggatggtcgatatgatggcactcagcgcctttgggtcggtccgcaggaggtggtcgagatgcgcgatcgaggcgtcgtaaaccgagaaggacgattgcgaggagttgcgccggcctgcgaggtagaggctactcggcggatagctgaccgaatggctctcatcgacaatggcgtcggcggcgtcggattcggtctgcgtcgagcggttaaagaggccggcgggcggaaattcgccgaatagctgagtggccatcgagcccggatcagcacaagtgaagtccgggaagaaagagaggcagactgacgttgttcagcttggctccgcgcttgacgccgcccatccggtcgctgctcgcaggaccctcgtcgacctcgtcgtcgcttgtcagatcgacggcgtcctcggcctggcccttgcccttctgcgcgagggccgagcggccgagcgtgtctttggccctgccaagggcagttttccagccaccttttgcctcgtccaaggggttggaaaactggctcggcgcagcgccggaagcctcgagccagggaccggccccgggcgtcgccgcaaagacgtgctcggcgccaacctcagtcccgagcagatgatggatcttgctcaaccgaagccgacgctgggcgtccgagagaggcgcgagtgacaagctcggtgacgtcggtgaagccgagtcgatgctgaaccaagaggcccgctggccgacagtcgtcgagacggacgagcggcgccgtcgcgtcggcgacgggggcgactggtccgaaggtgaggtcgacgagtcaaacgagagggcggccgaccggcgtcgcatctcggctgtcaacggagaagagggagatgagccgtaggaggtcgaaggccgggtcggcgacgaggtggggtcgctcagacggcgagcggtgggcgagcgctcgccgacgatgtccagcggggcggcacgggggtaggagagcgaatgtgttacctggtgttcctgaagcgtcgatccaaggactctgtgagagaagaaggtgacgtcgtcaggatcaaattctatgcaagggtggtctctccggcatacggacctctctagcttgcgcgcgcgccgcatcagcacggccttctccttggccgtcaggccttcgcttgacggagcagcagtaccgtcgcctgccttcgaagtcgctccgaggatttcgcccttgaagggcgcgagaggctggcaggccgatccgacatcggcgttagcgactcgggcgagagtggctgctggcccgggagtcggcgaccgctcggcgatgatcgtcatcaaaggcgagcccgagtcttgcgagcccgcagagaggacgctgggcgccgtcgactccgtcgggctcgatgcgtaggacagggacgatgctggggcgggatggccgggtgagatggcgaggccgggagggggtgacccgcgggccgttggcgaggtgctgttgagcgcgtccgggccgacaggcgagctggagacgtgaggcttttcttgctgctggccaaagcgctccgaggtgggactgtcgagttcttcgtaggcctcgtcgccggtcgaggcggctgaagggcagccggtcgaggctcgagcgtcgacgagctcgtccctcgacggctgagcggcgccggccgagctcgccggactcaagcggagctcctcgaggtcgagctcgtcgtcgacggagttgggttgcccgtggtagccaaaggttccggccgagtaggtcgagtcgcggatcgtgtcgcggacgacctcggacggcgtggtcgacatggccggcaggaagggaagggaggatgaaaggggcgaaagggaagcggagccggcgggcgggagagccgagcgacgagaggttgttgtagtggaaagtgtagagtagccgagcggatgccgaggtgctgtaggcctgtacttctgggtgcggtcgtcgggcactggtgaggttggtgggcgtcagagttcgtgggcgtcagagtcggtcgtggtggctggggcgacagctcggttctggctcgcgcgcgcgtcgttgtggcggccttgttcgcgtcggcggacggcccctttctacgtcggtcgtccgacctcctgcgtccctttcccaccttcatgtggtccaatagcagaccagacgacatgggatacgcatctaggctgcctcctctcgctaggctcgatctcctcaagattgcgctctggatcaggctgcctccttgccccaccgaccggctgcggggtgaaacggtcggtcggaggcaaaagcgcggtcgaaagtcgtttgccgatagctcgacgacaggccagagcagctcgaaccgcaagtcctgctccttccctagctagcaagatgcctcctcccaagtccaagaagctcaagccgagcggttcggccggttcggcctcgacctcgaaggttgcccagatcaagtcgctcgagcaagccctcctgccgtcggcagccgaccgctcgccctcgctcaacccgctcgtcgacctgctccggctgacgacgacggcggccgagcccgaggtcgtccacaagggcgtctacgcgtgcggccgcgtctttgcctacctcgccgtcgagggccgcgtcgggccgagcgccgttgacgcccgggcgcgcaaggcggctgaggtcaccgaaggcgaggagaaggtccgccggtggctcgccgaccggctggacgagtgggtgacgttctgccagggcctcctcaaggacgttgagggtgacctccgagtacgtcaagcgctcgctgctgtccgattggccacgtgagctgggttctgacccaccgttgccgtgcctctccttcccgatgcgcaggctgccggcctggccaacctgctcggcctcctgcctgccctctcgccggtcccgaccgcctccacctcggccgcctcgtcatcaagcaacccgcagccccaatacccaaccaaccacctgcgcgccctgctccagcctttcctcttcccttcgccgtcgatgcgcggcggctccgaggagttctcgctcgtcgatgaggacgacaacgacgacgaggatgagatcaagggcatgcaggtcgaggccgacatggtcgagaagctcggccagacgatggagaagaatcgcgacatcaagtgggccgtctaccgcgaggtctcgtgcgtcctccttcccgctgcttccaccgccgtcgatcaagagctgacgcgcagcgcacaccacctccacctgctgtacactgcagctacctcctccgtcctttcatgaccgaccccgagtcgtcccacccgtaccttgcgacgaacgtctttaccctcctcgcgacgcagacgaccttcccggcaacgcagaaggcgctcgagaagctgccggtcttgctgccgggcttcgccgaccggccgttcatcactgctgcgggcaaggccgccaagggcgagacggacccggacgactggcgggcttactttgactcggattcggaggagtcggatgacggtgcgcctaaggcccgaggcccgagcgcgcccggcaagggcaagcgcaaggaggtcaagggcaagaagggcgagaaaaagcgcgagctcggcggccgggtcaagcagatgacggtccacgagggcatctggagcctggagagcctgcgagcgggcttcacgagcgcgtggatggcactcctgtcgctcccgtacgtctctcggccgcagccgaaaggttcgcatcgcgtacgcatccgcttgctgaccctgctcgcccgtcctcgtcaaccagtctcgagtcgagcattgcccggcagatcctcgtcatcctccaccaccaggttctgcccaacatgaccaagggccgggcggttcggacggcagactggctgggagagtgggtcgaccgaggtacgttagacaccttcccctgatctggttttctgcggcccgctgacctgtcttcgaccgttgcttgcaggaggaccactcggcctgctcgcgctcaacagcctcttcattctcatcacccagtacaatctgtgcgtgctcccgccaagcaaatgccgttgctggccgttcgctgacgcgcgcaacccggttccctccgcagcgactatcccgacttctacacgaagctctactcgatggtcgaccgcgccgtcctgcacgtcaaataccgcgcgcgcttcttccgtctcacagaggccttcctctcgtcgtcgtgcgtcgtgcccagccccttcgcggtgaatgcctgccggctgaccacccgctctctgatcccatcaggcacctgcccgcgacgctcatcgcttcgttcgccaagcggctggcccggctcgcgctctttgcgccgccagcaggcgtcgtcattgtcatccccttcatttacaacctgctcaagatgcacccgtcgtgcatggtcctcatccatcgcgacacgtacggcggcgaggagctctcactctcgagtccagtcggcgctgccggtgcgttccttcttgcagacaaaagccgtgggccgacgaggcgctgaccgctctacatcttatttacccttcgcagacccctacgagccgtcgaacccgtcgccgttcgagtctaaggcgctcgactcgtcgctctgggagattgctgcccttcagcggcattacctctcgcccatctcgtcgctcgcaaagatctttagcgaggtctttaccaagcccaagtacggcatggaggacttcctcgaccatacgtacatgacggtgcgcacccgactcggtcttcagacgaagcaagcccccccgttctgactccctttcctctgcgcgcagatgttcgacaccgagacgaagcggcacctcaagaacgacccggcgctcgcgctgccagtcgagggcgccgcctttccggccaagcgggcgcgcgacgatgatggcgaggagaccgtctacatcggccgcgatgccgtcgccgagctgtggaccttctgagtggggtctgaacggatgtgcatgatcgtcccaccgcttgatcgcctcgggttgttctcttgtgaacaaggaacggcttgctttaagcttcgacagtgctccagagggccttctctctcggtctggccagtgcgcccctcctcccgtctcgttgcagagcaaggtcgaccgctgagtcgctcacctcagtcaaaaactctcgtgcgcagaaagaatcggtagacgtggataatttcctccccagtcctgccagcccgtgcagccctcagctcgagcctctggggcggcaggtgtgtcacattatcaaaccggcccttgcgaacaactgtccgcggcaaaatccggccgttttggcgacctcgatcggggttcctcagacgcccaagcgtctggggttgcggccgcctcccgcgcgcgcgcaggctccccctgcctcggcacgatgagagcttgttcctccctttccccgtccgtcaagcaatgtgagtctgcgccctgccctttggcctgccagatacctcccctgacacgtcgtcctactcgccctagatgccccgtgctcctcgtaaccactccaagagtcagtctcgctgtcatcgttatcgcctcggcgccggagctgtcgcggaggcagcagccggcaggcacccagccagcagcggcagcagcaacagcagcagccgacccagggctctcggatgggcctagggtcgcatccagcactagaagggggctgacagtgttgccggccttctgctccgaccttggtttggcgagcatggcctgggcgcttcgagggcatccgagcctcgtgcatcccctcgctgctgctgcctgtcgtcgctgctgccggacgctggcttgcctgcccggcgtcgcgacttctctcgcccccagagcgccctcctgatgcttgtctgcctctttcgccttgctcctctccagcctacaaggtcccccggcgtcccttcgagtcggctcgtctcgacgccgagcttaagctcgccggcgagtacggcctgcggaacaagagggagatctggcgcattcagctcaccctctccaagatccgtcgtgctgcccgtgagctgctcaagctcgaggccaaggaccccaagcggctcttcgaggttcgtcctcgccgcattgtcgtcggcggcgggttgggaaggagtgtaggcaggggccagggctgtctgtcgtcggctgggcaatgggctggtcttttacctgagcggggcgcccgggtcggatcgtctgcgggcaacgttgccacgagcgtgttggcgtcgagggtatcgccctttttcctcgacacgggcagctgaccctcgcgtccttgttcctcttttcttgcagggtaacgctctcatccgccgcctggtacgcatcggtgtcctggacgactcgcgcatgcgtctcgactacgtcctcgccctcaagaccgaggacttcatggagcgccggctccagacccaggtcttcaagtcgggcctcgccaagtcggtccaccacgcccgcgtcctcatccgccagcgccacatccgcgtcggcaagcaggtcgtcaacgttccctcgttcgttgtccgcctcgagtcgcagagtgcgtagcccgcaccttccctccccgtcgttcgcctttggcgcttgcctccgcccggtcgctgaccttccttcctccctccctttccgcctcgtagagcacatcgactttgccctcacctcgcccttcggcggtgcccgcgcaggccgcgtcaagcgcaagcgcgctgccgccgccgccggtggctctggagaggttgaggacgacggagctgagagcgagtagtgcgctcgagttcccctccgctatccatgaccccaaaatcaaaagaggccttgtctttcttgtcgaaacgagagacgaccgagtcagcgcgacgagagcaaatcagtgaatgcccgtctcttgcactcgcccaattgtgggcaacccactcgacatgagccgagcgaccgacgctgcctgttcctgtacccgccgcccgtctgcaagagatcacgctcgtctccttggttggatcagagcggcctggccggtggtgacaggcctgttggacggggctcccctcttctgcgtgccaggcggcgcgcaggcggcgcgtccgtgggaagacgctttcgagctggctgctctcactctcacctcctccccgtcaccctcaccctccaagagccgcctcggtcacctgcgagcgcgcaaacgcagcaccgtctccagagctccctcttccgcttgccagacaagcctgccccgagccgcaacgaacgatggtcgacgcctgctgggtcaagtgagtttccgccctcgccctcggcgcgcccgtcaccgttgtttctcggaagccagagcgggaggcccggatgcaacggcgcctgcccggcttcaagagctctcttcggtgcagaggactgacccaggtctccttctcgctcgtccgtttgcagaggaacgagtccttgtgcgtcgcctccgcttgttgtggtccgcccagcgaaagggatcggcgcctgctccgggctcggcgctgcccaggacgctgaccatctcctcctacttctcgcctcggacagacgccaaggcttacgacaatcgcggaaggccgtgtaaggtctatggcacgaccgactatgtcgtcgccatcgccgtctttgccgtccgtgcgtccgaagctcctccttcccccctgctcgaccgcagcagccgcaggcgctcgtcctcccccgcttggcgcctgcctcacagctcgatccgggcctcttgctcgtgtcaccctcagctgacctttctgctcttacccgctcccagtcgccgtcatccttgtggcactcagtgcaggctggatcatccgctactcgcgccgggcgtccaagttccgcgcattctggaaccagcagccgacgcaagattacgagctcaagcagcaccatgccgcgcttctcaagcagggcggcatgaaatcggacgacgcgagctcgatccggagcaaggtctcggtcgcgacgacggtgccaaagtcgacgagcaccgcccagcaccacggccggagcccgctcgcgacttacgaggacgtcaacgtcggcgaccggcaatgtacgtcgacgtcaagtgctcgcctttctagtcttcaggtactgacccgtccatctacgcgtccaacagacatgggcaccggctacggcgacggcggcatgggctcgaccgacttcaacagtggccgcccgctgccggcctcgcctcgtacgttgcgcgcctcgtctctcgctgacagcgtcatgcaactcgctgacttgcttcgccgctcacttcccgcgctatacagtcgctcagcagcaattcttccgcaacaatacgcagccgtggcagaactttggcccgccgcacggcgacctcggctacccttcgacctcgcaggtcaacctacacgcgccggcagacgagcgcgccggcttcctgtacgacgatcggacgagcttcgactacaacagcggaccgcccgcgcagcttccgagtatcggcagcgtacttccctctaccattcgctctcgctgcgcaagccgttgctgattgagccccgcttcgcgtccacctcgtagttcaacccgggcggcccgcaggcgtacaacccttacggcgcgccgccgcctcagcagccgcggtacagcaacccctacggcctgcgcggtcctcgcgatccgcgatagcgccctcgcgaatcctgcgtcggccgcagcttcacgcttgtttaatcccttatgatcctcgctagcggaccgccggtcgcagcgctttcgcactttcttcccttgtctgtcactgcgtacactcgcgcatgcatcctctccgatcactccacctctccgtcagagcttacctcactcgccattagatcgcccggctctgtttgccttcctctcatccccactcggacactttccttcttctttcgctctatgatgcggagactctcgcacgcaagctgagggttgcaaatgggccatgacagcaggaccgacggactaatacagcagatgaaagggatacagtcgatgatgggcgctcagtcaggcggctagacggcgaccttgactcgcttggccggccgaccgtcctcttcctccccggggtcgacgccagttgcctcggcatcgtcttcgtcaagcgcagccacttcggcgttctcggtcggctgcagtcgtcggaaacgatcccaaatcagcggcagcactcatccggctgccaaaagacgaatgagcagaggctcgatcagacgtaccaacagattacgcttctcagccccatcaagctcctcgtccgcctcctggccggcctcgtcgttgtactgaccggcgtcggggccggtcagctgctgctcgtcagtgtactcgtcgtcgtcgctgtcgtcgtcatcgtcgtccgcggcatccaggccgagcgcgtcggcctcttctcgctatcaagtcgaagggcagtagacggtcagccgatcatgacgcagacgggtcgatcagggaccacgcacatagaggtaggccagcccgggtccatccggctcgctgccctcgttgtcctcggagtcctgtcgtcggcgacgcgttcgtcgagggcagcgcatcagcatctacatctgccagaaacctccttcagacgatgacggcagctgcaatagattcgcacggacgcaccgtctctccctcagaaaactcgtacacctcgttgtcagagtcaaggccctcggcctccgctaggagccgcttgcggagtgtctcctctgcaccttcaaccgcgtcgccgttcgcagctgcggcgggcgcctcgccggcatcattgaggtcggcggaggccttggcagaaggccaagagactgccgtgtcgttttccattgctcggagagatcactcgagcaggtagcgggaggagagggcgagatggttgatggaggttccgagggcgcgacggaggatcctgatgactgccggcgctaagcgcaactgagcgggctccgacctgtccccgaaccactacaccctcctccgcctcttcctcaccctttcctctcccagacttgctcagatggcgtctcagatcctgcccttaggtcagtctactccgctttcgacgcgaagagaagcattccgggcggtcgagcagccccggctgacctcctgccgcctggcgacccgctcgtctccgcccgttgacccttcaaccctgtagagctcatcgaccggtgcatcggctcgcggatccacgtcatcatgtacgccctcggctgttcgctggacctgtgatgcggagtgctgaccctgcttttgatcccttgactcgcgcaggaagagcgaccgggagttcgtcggcaccctgaccggtttcgacgagtacgtcagtgagtaccgggctgccccaaagcctgcctctccgccgaagctcaccgctgacgctcgaggctgcttcttgcagacatggtcctcgaggacgtaaccgagtagtcagttccgctcacccgaggtcgtctcccgacgggagctgcgctgcgcctttccgcttcgcagctcgctcgctgaccttgggcccacttccgctgcagccacatgacggagcagggcatggccaaaaattcgctcaaccagacgctgttgaacgggagcaacattgcgattgtgagtcaatcgacacctcctggcttgcgtagacggaggcgtcccgggggctgatcgcagtcgcttatcgaccttctgcagcttgtgccgggcggagagggaccggagagctcatgatcgcgcgcaacggatcagatgaagctaccatgtacggtggtcggaggcgtggcctggggaagggtcttgttgcaaaggacgctgaccgcagggctgacggggcggtagtcgctcagttggacgccgggccgaggaaggacgttgagctctccatcacagagcaactcagcgctaatccccacaactcgatcgactgctttaagccgacggaggcgagaccggtggcgagaggtcgcggcggccgagaggggggcggtcgcgctgacgcctcgaccccgacgaccacctccgcaaccacctgcacaagctctcactcttcatcactcgacgcacgcgcatgctacctctcgttctcccgtcacagtccatggccacgcccgaaacgtcgagatcggccggcaagacgccctccctgcaggcccaactcgccgctctccacgccgactaccgcgcgctcactctcgacccggtatcctcggggaccgtcgtgcgcaaggacgacattggcggacagaccggccgcagcgactttgagatcgagcgcgaggccgagcgcgtcgtcaaggggcactttgagctcctgcactcgtacaacgaggtccgagacgcggtcgaggcgagtgccctccttaatctgttgtgtcctctgctgaatgcgttcaactgaccggaccgctactgctccctcgcctgtacagaacatgattgacaaagtgcgctcgggcggcgtcgaggcggatgggtgtatgcgtacctagacccccgagcggccggcctgaccaccttcccggacgtgacgcagtacggcgcgctcgtcggccgcacagcgaacgagctcaagacagacctcggtctgaccaggtatgactgaggacgagaacgcccacttgggggtcggcccggccgacgcgattgcggcgcagcgtagcggcgatcatgttgggccggtcactggtagcagtcggagcaggtcgggcgaagggaaggtgtcagggtgggtcgtgctgagatgctactaccgcgccgcaaggcggtgtctttgcatagagcgctgtcgtcggtcctggcgaagcaattagagccgtgagcgcccctccgcggaagaggagcgcgcagcctggtcgactcgacctcagcaggtcggcggcggccaggacactctgccctcgctcttgtctgcgccccagtcatccgactcgcttcgcctctctgctaatctgctttggtcgctgctgctaactccggcggcgccggctcgtcaaccggcccgtacgtgagctcggagccttttgctagctcgactcggaggtggccgaccgacccgcctcctctgccagccctgcgttgacggcgaacggcatcgaccggccgcccgcctgctcgccgctcacgaggtcgctgaccgcccatcgctgtcgaccgcggagctctgttggggggtccggatgtaggatgagccggcgacgagccggaccagcagccgagggctgagcgcaacctccctcaaaagccagaggtaggccggcccatctcgacgtctctctcggcttccttccttccctcctcaacgccagccgtgatcgagtcgcgtccgatgcagctgctctctctcgctctaacccttcctctcgccgccggcctcgtcgcggcgatcccttcggacccggccgcgtgcccgaccctgcccggctacaatcagacgcggacttacaccggccccgtcaacctcgccacctgccagaagccgaaggttcgtccagggcgcctcgctgcgtacttgtacgagcaaggactgaccgctttgttccctcctacagccccaaggataccagctcgatggctgccctcctggcacgctctacgtcagccagaccgacccgcaggcaccattcggccgcatcagcgacgccgtcgcagccatgtcagtctcctttcgctcactcacttgagaacacatgtgacagaggcctctcggcgtcgccatcagtctctcactcacgtcaggtgccccttgctgacgtgcgctgaccgtttcgcccgccctaactgtctcgcgctgtccatccttcaggccggtcgacgactccccggttgtgattttggtcggaaacggtcaatatcatgaggccatcaacgtcacctcgccgagaactggaccggtctccctcattggcatcaccgacaagccgaagaactacaaggacaacggggtgcacgtctggaagagcggattcgtgagtttgcgcgcacgtctcggctcggaccctcactaacatgacaccctcacctccaacctctcacttagatatgccaaaaaaatcagaggacaggaaagcccaccgttctattcggctttacctgttttcattgcagccagactgaccttgtgatatgcttgatgttggcagaccagaagaacgcgtgcgtccgctactcttttgtgccctcctcgattggctgttgacgtgcagactcttcacagggacgccgccgtcctcacggtcgacttcccgtcaggcccgaatggccacacctcgccgccaggagtctttaccgtcgccaacattaacttcgctaaccgggcgacggtgcgtcgcgcgcggtccttcgctaccggctctcgctgacctcgagttttctttgcagttgggcaacggtaccgaagccaagggccagaccggtccagctgccgccgtgttcttcacatgtaggtcgattgctcgaactgctctgcaatctgcaaattctgattttcgtccttccctgccgcagggaccgtacgtggcccttcggagcgtgagccccgctgccaggcagccgattctgagcatgtctcccccctctgcagaacgctacctctattgccagctcgtactcgtcccaccaggacacgtgagtcctgtcgcaagctctcatgcaggcaaggtcgtgaacggtcgctgaccctgctcttaaacatggaccaaaggtggtatgtcggaaggaactcgtgcgtcatctcatttgctatcttccctctgcctgtgactgatccctttgcctatttgccgtcgctcagatccgtcctcagcatcggcgagtacatctcgggcggcaccgactacgtgcgtctcatcgctcagtcaagagccaagtgacgtcttctgacgcgccttcttccgccagatatacggctacggcctggcttggttctcgaagccggtgctcgccaaccgcgacgtcggcgggggtctgaccgcgatgaaggcgtgagtagctgacttcaacgtgcagccgactcgctcagccgtcactgaccaccctcctccgctttcctgtcgactatgacagcgatggtgagcctgaagtcaaggtagggcctttttgttcgaccgcgccgcttcgactttgaagactgactcgacccccctttctctagactgtcgtttggcatccgctcacaaacatcggtgccgttcctgcctcagccggcttcaacttcggcgtctacatagatcagggcaaggtcgtcaaggccgacgacgccctgcccgagctgcagctgagtgcgcccggccagatcctcgatcagctgcttcgatcgctgacctccattcgccttctctccgtgcgctcagccggccagcgcgcacttggtcggccttgggtgcgtccgaggctacttctcttcctgctcgatgcctggctgacctgcttctctcctgtggcgcagggcaacgcttcgcgcgtcatctaccaggtaaggctagcctgctccccctgtcccgcctgcctcctctcccccctgacctatctcatttggacttgcgttttaggacacctacatgagcgacatcgtcctccctgcgggctttatcaagtggtcggagaccgacccccgcatcggtaagcccttccacagaactgcaactgccaccgtgagagggtccgactgacgctcctcacacttgctcactcgcagtgcctaacttaacgaactttgtcgagacgggctcgcacggccctggcttcaacctcgccgcccggcttaacaactcgaacattcagacgacctacactaagaaggagatgaagcagggcatggtcaacggcaagaagacctactggacgctcaaggacgtctttggcgaggacaagccgaagtgggtcgactgggactacgtcggcaagctctgagcggctcagcgcccgcttgattcggacccgcctgtacatacctgaccaattcgcatgctcgccctctcacgacttgctgctcgccgtgcgagcgctcccgagcgagggccgactccctctcgcagctttcttcacatggcccatgagatctgagcgagaagagagtctaccggtgaaccaggcgctcatgacaggctggcgccgacaaaggtcttcacgacgcagtaaccgtccttcgtgcgaatcttcgcgacctcaccagtctccttgtcgacccaggcggcctcgagcgagggcagcgtcgtgaagccgggctggaccgtctcgaagatcttcttcttcgggttcatctgctcgagcggcgtggcgtctgtgtcgagtagaagtcatgtcagccaccgagcctacgcagacgagcctcagtttggacgcactctcaaatttgggcgactcaaagtagatgcgctctccgggagcgctcgccgctggcggctggacaaactcgaggcctccgtccttgccctcagcgctcgtggcctgccagcgggcaacaagggctcatgcgaggtcagcgacagctacaacgaacgatgagagcaagcatgagacccacgcaaagcagcatcgcgtatgatttgacgccacgcatggcgactggcttcatgttggcgacgacgacgacccgggcgccgaggacctgctctggcgtgagatagttgacgaggcccgagataacggtccggggctcggcctctccgacgtcgatcgtctcaatgtagagcgagtcggcgtccgggtgcttctcgacggcgaggatgtggccgactcggaggtcgatcatcgacgggttcggggccgccgccggctcggctgccggtttgggtaccttgggcgccttctccttcttctcctttttctgcgtcttctggtcggcggcggcagcggcagctggggcgggcgcaccctcggtgaggccgacggcagcagcagcctgctgagcgccagcaactgcggacgaggcgagcgatgaggcggcggcaccagcggcgaccgttaggttcgagagctgctcggtgacgccggagacaaggcccttggcctcctgcttgacctcagccaccttgggctcgacggcagcggcggcaccctcggcaaccttcttaggcttcttctccttggcaacggccgacttgcgctcgaccttcggcatttcggccaggttgaagtcgatcggcgcgtaggccgacagcgtcggcttgagctccggcagcgactgaaggtggttgatgtagcgcgtcagggagggcgtcgtgtagtactcctccttcgtcttggagacctgtaaacaggtgagcagtcaggctggtcagtgacgctagtaagctgatcttgtgttgccggaacggctgagacgcacgaagacggggtggagggcgccgaaggtcgcgacgtcggccaccgagagctcgttgttgaacaggtagacgacgggctcgaccttcttgtcaaaggcctgtcacgagaggggtgggcgccatgtccggtcagtcctggcaattgcgaggcggacgaggcgatatactaagagatcggggagactcgactgacctggagatcctggccctccttgccggcgctaacctggttgacccaggcgtcaacggcggcggcgtccttggacggcgcgggcagcgtcttgcgagcgtcggcgacgagagcggcgatagaggacgacatggcgtaggttcgcgagcgggtagaggggtgtacgagcggcgtgcgggggaggcgatggaggagcgaggtcatgagccaggacgcacagagctcgggcggggaaaaaaggtcggggcgctgcgcgacgacgcatgagttgtcaaaggcacacgaccgggtcgttcaggctgccctcaagactccagtctaggaaagcagacaagggggcgtgcgatgaaggcatggtacaggttgaacggactgcgagaaagcgacgaatacaacagtgaggagccagacaaggcggcatggcgccgtgctcagacaacgggcaaaccaccccgccgaccggccgtggcaaggcagccctcaacgacaccgagcaggtgcgtgttttcgagcgccgctgcgacgcgctccttgtcgttcagctgcttgttgactgtcggcgcaattgggggatgggggagagaggggaggggaggaggcacaggtcagtcatggtcccttttgaatgagcgcctctcgtagtaactcgcgaagacgaacctgccacctcggactggtgagagccctgcttgacgcgaatgtccaccttgtagcgcccaggcagcgcccgcaggaggcgtactcgaaggctgaggcctagagaagagcgatcatccgaaggcgagtcagcatcaaggcttttgttccacagacagaacagcgcagcaggatgagccgcaccaatcagggtcgccatcgagcagtgaggaattgtcggcgtgaactcgacgagcagctggttcttgtgcgggaacgaaatctgcgacgacgagacgactgcgagctgctcgagcgtcaaggggtgctccgggtcggtgatggaccgcaggaggtctgtcgcaggacgaatggtgattgcgagtcgttggcgggtcggatatatcgggtcgaccgtaggatgcggacgagcggagtcgcgacgtgcgagcgtgcaggtagaggtgggcgaggacgacagtgaacgcgagagccgggtccgttcggatgaagattagcgtcagaccggtccatcgcagagggcaaagcgtttgtgcagagcgagagagtgtttggtgagttccattgggaaggaggaggaggaggacgtcgtctcggtcagcgccgcaagccgtgagtagagctaggacgccctgccggcgagcgacgtaccaaagatctcctcggcgtcgatgtcgtccgcggcatcatcgccgtctgctgtctcgtcctgctcgaggtcctcctcgtaaaagtcgtcggcaccctcctctgcccagaggtcgcggacggtgcggcttgcgccgccgccgccaccgacgcgacgcgaggccgcgccaaagatgccgctcgacgacgaagcggcggccgagtggatcgtcgggttggcattatcgaggttcgacatagccgcgttggttgacctggggtctggaagaggacagcgaggagggcagtaggatgcggtgtcgggtcagggtgagctcaaccgccggctcggccctttcagctttcggctctcctgcggtcgcctccttctcctcgactcccatctgccatctgcctctatcctctgaatggtcgccctccccaagcaggtcaacaaggccttgacaaagcccaaagcgccggcctcgttcaagaaggcccgggcgccgacggcgctgtcggccgagtttccgctgcccaagtatctttcgctgctcggcctccaggctgtcctccttggctttgccgtccttgccctgcctcggtccgacctgcctttccagctgtcgacggcgcggactaagacgtcgctcgaccgtcccgagtgggcctgggtcgcctttctctcgcgcgacccgcttgcgttcgccggctgggcctgcctcggcggcgccgtcgtcagcgcctggtgggcgggcgagctcggcaagctcgtccaggaccgggccgactgggagcgctcgacgtctggccgtgaggagtcgcaggaggaggttgtcgcccgcaagacgggcgcaagtggcaagcgcctcaaggtacgtgcacctcatattcccccctgtccttcgcaacgggcctcgtcagctgcgtctcccggcggcctgcgcagtcatccacttcgtcatcctctgacttacactcggcgcttcccactccccagtctctccaggacgccctgctggcgacgctcatcgtcactccgaccctcactgccgtgctgctcctgctcggtgcaccgctgccgtcgctctcgatcgcgtccgttcagacgcaggtcggcacccttggcctcgcgctctacctgtcgacgctctgcgtctttgtcccggtcagcgtgctcggcgcgcctgacctgatgactgagggcgtccaaggcggtagccagcgatggatgtgggtccggatgttcgttgagcgagagtacgtcctgctgtcttcatctcgcctctgatctgctcgtatgcccgaagccgagcgctgactgtaactctcgactgctctctacagcctgaagacgccgtatgagtgcgccctcgtctacccgccgctgtttgccctcgctggcgcctggctcggcgccctcccgctcgctctcgactgggaccggccctggcaggcctggccgatcacgccgatcctgggcgcgaccgctggctacattgttggaggcggctggagcgctgcgacggcgagcgtcgatgcgcttgctcgtgttgtccgggaggaggacgcaaaggcgaaatagatcaaaaggcggcttcttcgtctgatgcacagcctcgacacgggagtctgcgcgtgcccgggacacttgcttggatcttcgaaggcgctttgcaaagggagggctgtcggtctaaggagcagacacagcggccggagttgcagctgcgcggccgaaggtccctgcctcgacagcctccagcccgagtgttttgtcgacttgtaacgcaactgagccgtgtttcaatatgagagagagcagctcatcgatctctcgtgggcctgttcaagctgaaatgagcgaggtgcttgcaatcagtcgacctgcaagggacccgtcgagctcgcctgacatcggccgcctccgtccgagctcgtcaacggccgacacccaccctctcgactagctgagaacaccaccctagatttctttccccttcctcgtccgcactagaaataccttgaacgtgcgtcttgactgctgcctcccggtcggctgtcttcgccgtacgggactggcagactgcagccctcacgcacaacgcgtgctgaccaagttgctcttgctcgtctgcagcggcttaagtctcgctggcttcctttcatcaagcgcctgccactttcacaagctgctcatcaagcggacgatatctagaacgtctcggtccagagtccgctgccttctcctccgtcccgctgccctcgcaccttcgcccgcagcatggcaacggcgacctccaccggcctagcagcagcggccgagacgcccatcactcggcggctcgccaacgtttcgtcgatcgtgctcgtcctctctggaaaaggtggcgtcggcaagtcatcgaccacggtccagctcgccctgtccctttaccgccagggcttccgcgtcggcgtactcgatacggatctgaccggcccttcgataccacgcatgctcggcctggacggccagggcgtccaccagtcgaccgacggatgggtgcccgtctacgccgatggagctgagcagcgactagccgtcatgagcgttgccttcctgctcaagagcagcaaggacagcgtcgtctggcgcgggccgaagaaggagggcatgatcaagcagttcctcggcgacgtccgctggggctcgctcgactacctgttgatcgacacgccgccaggtgcggtcgtgtgttgtcctctgggtctgcttcgatcggtcgatactgacggcctgcatttgctcgtcgtgctgcagggacgtcggacgagcacttgtcgctcctgacgcaccttcatccgctggcgtcacggctgtcgtcggtcatggtgacgacgccgcaggccgtctcgctcctcgactgcaccaagtcgctcgactttacacggcaagtctcgctcccagtcatcggcctgatcgagaacatggccggctacaagtgcccctgttgcagcgaaatcacttatctctttggtaaaggcggcggcgaggagatggcccgacgcgagggcctcgcctttctcggacgcgtaccggtcgaggccgagctcgtcagccttctcgactcgacggcccaggctgttcaggacggcaaggttggcgtcgtcggtggcggcagcaaaacaaacggcgcaacgacgacgacggcgagcggcgaggagcgcctagagtttgacctgctcgagcggtacggcaagacgctgagcagtgccgtctttgaagggatcggccgcaacgtcgtcaagctgctcaggggcgaggccatgtcggcgatcgagcccgcgacgcccgagaaggcggccgccaaggctgcgagcgatagcgcgtcgcaagctgcggagccgaacgcgtcctagtttgaggggcgggagtcggctgggttgggagactttatctgtgctcgaccatgtcacttttgacttgctggttggttggtccgatgcctggtgtgtgtgcttctgacccgttgctgtggctcgaactctgcatccgtccgtgatgacggcggcggcgttactcaagcaggtcgtcggcccgagcgtcgtgtcgtcggcgtgggccgggctgagcgaggccctgctcgctcgcctcccaaccagcacccctcctccccccttttgtcttgagcgagcgtatggcgcccaaagcatcgcccgcgaagcccaagcagcagccgttgacgccggtcaagtcgccaggaggcctccgccagcgcgtgccagcggccaatggtgcctcggccgccgttgcccgccctgtagcggcgtcaactccaggcggtggtacactgcacgtccagctcgagcctcaaggggacggccagtaccgcatccacgcgcccgtacgtccttgcccttcacatgcacgctcgctcgatccttctagcagaatgtcatcccgacccggaagactgaccttcctgcgcgccgcttgacctcgcttccgactccgcctcctccagggcacgccgctcgatgagctcgacctcgccaacaccttctttgcgcacacgcatgcttcgcatcatgagcagccggccgccttcttcacctcgcggcgcttcctgttcccgctcgggctcgcgctcggctccctcgtggcctacttcctgctcgcgccgctcgacccgaacgcgttcgacgcctactcgcaccggctgtcgacgctcgtcgacgacgtcaagacgcaggtcggcggcctgccttcgttcccggagcttaacaacctgtcgggcctgcccgcccaggtctggaaggacctcgccggcctagtcgacaccgactcatactcgttcatgaagaaccgcgacttcgaggtcggctcggccttggccgccgagggcctgacggctgacttccccgtcatcctcgttccgggtatcatctcgaccgggctcgagtcctgggggaccgagccctcgcagcggccgtggttccggaagcggctctggggctcgacgagcatgatccaggcggtgctgagcgacaagaaggagtggatgcgcgcgcttagcctcgatgaggagactggcctcgaccgtaagggctacaaggtccgcgccgcccagggctttgacgccgccagccagttcatccagggctactgggtctggtgtgtcctatctgcctcttgccgtctagcgactgtcgcttctcggcgagctgacaggtgacgcgacgccgccttcccgcaggcaaaagatcatcgagaacctctcaccgctcaactatgtcggtctctgaagccccaaccttttgctcacacgcggctgaccagtcgaccggaccctccaggacaccaacaacctctcgcttgaggcgtatgactggaggctgtcctactacaacctcgagatccgcgaccactacttttcccggctcaagggcaaagtcgagcactacaagaaggtctcaggaaagaagacggtcctcgtcggccacagtatgggcgggaccatcattctcgtacgtccggcagccgagcagacggacgccagagctcctcaggtcgactgacacgtgacaatccgccccgtgccatccttagtacttcttaaagtgggtcgaggcttcgggcgaaaactacggcaacggaggcgacaattgggttgacgagcacatcgaggcgttcgtcaacattgccggcccgatgctgggcgttgccaagtgcgtccggcgccttcactgttttgccttgcaggccggttgacttacaaaacttgcatccctccgcgcagagctatggccgccttcctgagcggcgagatgaaggacacagtcgagatcaacccaatggcctcgtacctcctcgagaaaatgttcagccgcaaggagcgggccgacctgttccgcggctgggccggcagcgcgagcatgtggctcaaggtcactctcgtccgattacgccagcctcgccgttgttagcctgctaacctaaaaccttttttctgcatccgaccgatcagggcggcgacgccatctggggcgaccacaactcggcgcccgacgacccggagaacgcgaccgacacccacggccgcttcctctcctttcgggatgagcagcagtcgtcgagcgaacacgacctcacgtccgacacgatctggccgaacctgacgcaatccgacagcaacgtctttatcctaaagaacacgcctctaacgttccaggtgcgccccgtgttgtcttcatctgcgcccctcttggctgacgcttttttcatggagcatcgcagaaaatggtgggcaccaactactcgaacggctacgaggtcgacccagtcaagctcaaggagaacaaccaggtgcggcagactcggagccgctctgccctgccgcttcgctgaccccttcctccgtccgcaaccataggaccacacgaaatggacgaacccgctcgaaatcgaactgccgcgtgcgcccaacatgcgcatctactgcctctatggccacggaaaggaaaccgagcgctcctactggtacgccaagggcccgttccagtctgggcccaacaatgccgagggcaatgcgctgccggtacgttcgcgcccgctccttcccgcatggaaatctgagcttgcgctttgctgactctcgtgacttgcgcccaagcaggtcgacatgccaatggacgagagcgatacgaacggcacgaccgtgcccaacccgcttaacttcccgctcgaccgcgacctttggatcgacaacgccgtcaccgtcccttcagcgatccctgccgtgagctcggtcggcgagtctgcgtctgtcaagctaagcgctgatggcagtcccctacattccgttaggtccggagcggcgtcaaatttggtgagggagacggcaccgtacctctgctctcgctcggcgccatgtgcgttgagggctggaagcgcagggagtggaatccgagcggcataaagatcgttacccgcgagcaggcgcatcagccggaagcactcgacctacgcggcggcccggcaacgggcgagcacgtcgacctcctcggcagcctggccatgtgcgtccttgtctgacggctacgcccgtttgaccccagccctgacccttcgaccctcttgcgccccttcagcaacgatgccgtcggccggattgctgccggcaagggccacgacctcgaagacgtttttgtctccaacattcgcgagtacgtcgccaagatgcactggcccgatgtcaaggaggccgccgccgaggaggcctctggccggggccggcgcttctggggctagagaggacgactttatcgataccctagatgcgattgttcgtgctatcatgacgactaaacgaccagagagcgtccgttgagattgagtcggcgtttgcatgacctcggcgcctggtaaggacgcgtcctgctgtgtcctttgtcttgtggcgaggcttcgcgcgtcgacctcgccttgaactagcacgccgtcctccctcctctccccacctcacttctcttacacgctagcaaagatggcgatccactctgcgaccgcttcggctcccgtcaacattgcctgcatcaaggtgcgtcgagctcctccgtctgccgggcgcattgagctcgcagagcgcgcgcgcgcctgcgaacagtacccccccccccttgatcgtacgaggcctccggtgctgacgcttcctcgctctccctttcaatctggacctcgtttgcacaccccgcctaaatcgtcggcccaaccgcatgcccttcgtccctcctttgtatctccgcggctgtagtactggggcaagcgcgacaccaagctcattctgccgaccaactcgtcgctctcggtgaccctcgaccaggaccacctccggtcgacgacgtcctcggcggcctcggccgactttgagaaggaccgtctctggctcaacggtgaggaggaggccatcaaagctggcagccggatcgccgtctgcatcgccgccctgcgcggccttcgggaggccgaggaggccaaggacgcgaagctcgagaaggtacgtctagccagcaacaccacctattagactattgcctctcgcggaggtagggtcatcacaggaaaggagcgtcgctctcgcgaaggttcaggcctgagagccaagggggacgagtatgccttggctgaaggcggctctagctcagcagctccgacgcgccgctgccttgcaccgaccgcaatctgcgatgcctctcgctgactgaccacgctctcgtactcttgccagatcgcggccctccccgttcacctcgtttctttcaacaatttcccgacggctgccggtctcgcttcgtcggcctcgggcctcgccgcgctcgtcgcctcggttgccgcgctctactcgctgccgacgtcggcgtcggacctgtcggtcatcgcccgccagggtagcggctcggcctgccgctcgctgtttggcggctttgtcggctgggagatgggatcgcagtcggacggtgccgactcaaaggcgtacgaagtcgcgccgcgcgagcactggcccgagatgcaggcgttgatcctcgtcgtctcggatgagaagaagacgacggcctcgacggcgggcatgcagctgacggtcgagacgtcgccgctgctccagcatcggctgacgcaggtgccgacgtacatggccaggatcacggaggccatcaagcagcgtgactttgctgcgttcgccgaggcgacgatgcgtgactcgaaccaatttcacgccgtctgcctcgacacgttcccgcccatcttctacctctcggacgtctcgcgggcgatcgtccacgtcgtttcagagctcaaccgggctgccggccggccggtcgccgcttacacgtttgacgccggacccaacgccgtcctctacgcgctcgagggcgacatgcccgagatcgtcagcctcatggcccactacttctcaccggcgctcgagttcgacgacccgttcaagctcgcggccaagccggcggcgagcgcccgcgacggcttcaagcacggcatctcgaccgtctgggagcagggcaaggtcgcccgcttcatccacacgcgcatcggcgacggaccgcgcgtgcttggcgccgacgagagcctactcacggccgagggtctgcccaagacgctcaagcagtagactggtcgaccggcggcggcggggaaattgctcacgcgaagcgaccctagcatggcaggccgtgccggcgtgcaccggcctgatagagacctcatgggcttatgttgaaaccggggcctgctgccatcgcacctaagacgacttgcctgcgacctgaatgattcttgccgtgcttcctccaccttctcggccaagagttgcagtcagcagcgacagtcggccgccgctccggcgcgcagccgcccaaacttccttcggccgcgggctcaaccgcccgagcccgaccttgtcaccttctcagcgaccagtcgacgagcctcgtcttcaatttctctgaggagctcggcacgagcctgctcggctgcttcagggatgcgctgtatgtccacgaccgtatcacaaggatgggtcgtgcgggtaggctcggaggcgaggccaggacgaaacgggcgaggctgactcgtcggcctggtcagcaagccgagagcggccgctgaccccgacttggccggccggcgagctggtcttgaaggctacaacaggagaagagaagcctgcccttttaccgtcaccctgtcaaccccagccaagcgccctttcctggcctcctcagcaatgtctgcctctgtcgcttccgcgccctctgctcgccccgtccgaccggtcgccgccgtcctccaggctgccgccccctccgcagcaatacctcggccggtcacctcggcctcgtcgctcgctcgcaagcattcgacctcgtcctcgagctcgacctcatcgtcctcgtcgtcacttcgcacgccgataggatcgcttgacctctgtacgtctgttgccctctgcggaggcctacctgctgtacatgacctctcggactgacccaaatttctgccctcttcaagcggcccgctcctatctctcggctcactcgagctcgagctcgcagcagcacagccgcaagcactcgctcacgtctctcctgcaccctgcacgaccaacgacggccgatgaggacgtccaggcgattcccgcgcggcttcgatcatcgcccctcatcctctgcgcatcctcgcccttctacaggctctcgcacccgtccgaactccgttcggcggcctcgtcgtcagcggcatcctcctcggccggctcgcgaccgacctcaccctcgcagtgctactcggctgagcgcgaccgggcgtgcgcgctcgcgtcgaccgaggacgaactcaagcgcgttctcgacgaaatgctcttcccaccgccgcacacaaagctttcgtcggcgaccgctcggccaagaacacccagcgctggccctggcgcgccttccagccggaggtcgtcctcgtgaagactctgcatcgcctgctcgctcggttacgttgttcccccctccatctcgggctcttttgtctcgaatctcctcgtcgtcgtctacattgtaatctctctatctctcgtcttgggtgtaccgctacgtatcacgacccttctatcaatgccctgtcacgtcacttgatcctgtcgactcacaggccgccgcgcgaccggcgacgtgcgccttgacgggcgttgacgttgcttgaaaggagacggtcaggacgacgttacatctcgaacgtacgtgaaacttgcaacgcaccttaagtccagatacctactcggaccaggtgttcgagttggcgactgctgcatgccgctgcatcagttgtcgagagcgcgcgcagcaacagcgagagcagcaaggcgtcccgcctgtgcctcccccctcacacctgcagcttcctgaaggggtcaggattatatggcctggctttcggctcgatctgctgacgcctcaggtgcccttgtaggagctaagacggtctgacgactcccggtgtaccgtcgctcggttccgcgggtcgacctcgcggcgtgtgtgtcctgcgccagctcactctcgctcctcgcccgcagacgaccaccagctcgacccgcccacgccttgccttctcagcccatgttctcggcgctcacaagctcgctcggcttgtcgccgtcagccgcgagcaacctcaagctggcgttccggacgtcgggcgtgacgggcctcaagcggctgctcgccggccctatctcgaaggacgacgtcggcttctgggctcagttctaccagctcttcgacgacgccggcgaggtcgccggggcattgcccttcagcgttctccggcaggctcgagagcagcagcggaacaacctgcatacgctgctcgagcacctgctcgaccatctccaggcgcacgtcgcgagcgatgccttcccctcgcctgccaagggccggagcctgggcgagttcctcccagcggcagcccgtggcaaggcctctgagcaagacacgacgaccgaggcgctcaactgcctgcgtgtcattgcgcgcatcctgccgatcctctacgaggttctgccgacagctgttcccgacgcaagcgccgtcgacagccaggacgagggcagcttcgcctggcgcgtcctctacgcgcctcgaccgcagcgcaccgctcgagacggctcctcggccgacgactacgtcgagggccccaatagtacggccgctggtagccagcagtttgtcatcgactcggacgacgaggatgagcaggcggtgaggccggctcaagagccgccagccggcgtcgctgtgcgcccgaccgcaccttccatcagcgagcagctgttctcgctcacgatcgacctcctcttcctcactggcttcacactgccaccatcaacgactgagctggccgagaaagttgcatacacgatctggctgcctggcatcggctcgtcgaccgcccttccgccgacgtcgccgcgcatcgacgccaaccggatcgaggtcctgcgcttcctgcaggtgctcctctcccgggcgatctacctgccccccccgctgctcccttcgactccgattggaccgctcgcaaccctcacgtctctcacgccggcttcggatcgggcgacgctcgaccgtcggctactcctgagcgtcctctgctcgctcctcaacacgaccctgactcccacctcgccggcgctcatcaatgccgtgccctatgcccatttgctgaagggcggcatgggagcgagtcttgtcggcatcggtgccgaggagctttccgggaacctgcgcaaaggttgtgcgcacgtcctcctagccggcctcgactattgggcggacgacgatggccgcgagacggacggtaaggagggcaacgccttccgctacttcatctcgaagctcgtacgtgtgtcacactctcgtgtcgtctcgtcatcagacctgacgtgtgcgactcttctctcatctaaatagcaccgcaaagaggactttgcgttcctttggaccggcatcgaggacatcctcttcagccacctgacggcatcctccggcctgctcccaggcgccaacaagccgccgccactccttctagagacgtgtgcgtcggcgttcgatggacttgtcgcggcatgcgctgatggccctctcgccactctctacagggttcatcttttggcgtctcatcgacctcaataaggtgcacagctcgttggacctcgctgttccattcaaaaacagctcagactgacgcgctccatcggttgcatcagaaattccgcacgtggcttttctcagacgagcagcgctgctcagacctcgccggctacgtcctcctcaacctgcttgagcgcaaggatgacccgggtcagtcatctttgccagtcgtctgcagcgtcgagagcatgctgacttcgatcggcctcgccgcctgtttgaaacaatacagctcagcatccgacgctccggctcctctcctacattctccagacgctcacagctcagccgtcgttcgcgcgtgcgctgaatgagacgacgatcaacctcaacatgccgatcaaatggaagatcaacggctctgcggccgactcgctcatcgtcgtgcgtccgacttcgatcatctctaggtctcgctctgaactcggctgatgaccacgtcgcctctgcagtggatctgtgcaatcgcaacgacgcccggcatgagcccgctttttcccgtgcgttgcccgttttgccctaggttgtgttgagaggttctgaacgtgcttcctgcttcttctaggctctcaccatctcgatcgccaacatcgcgccttacgctcgcgaccttacgatcctcgcatcgaccaagtgtgtgcagctgctcgtcgcttttagcaatccggccttcctgctgcggggcgagagtcatccgcgcctgctcaactacctgtgcgttgcaagggatgggcgcttctgtcagcaagagattgacatcacccggtttgtcaccctctgtatagacttgaggccgtcaactcgttcatcttccgccaactttcccgtgagacccgccaccgacttgcgaagctcggtaatcggacgagactgacgctagtagcccccttgacagacaacccaaacctgctctacgctttgctcggcgctcatcagcgtttcgccttcctcgccaccttcacgctcaagaagggcttgcaagaggtcctgcgagtgcagcgggcaaaagcacttgcagccggtgcgtattggctcttccatgcgatggcagcgcttactaggtcggacggctgatccctcgtcgtcctgcagagcgggctaaaaacccggatgccaagaccggcatcgtccccaactccaccactgcctcgtcgcggccgactctcgagctgcagcgcaatacgtcgacaaatactctgggatcgctgcaacaagaggcccagtcgccggacgacaccccgccctcgtcacccgcaccagcgccgacacaaatgagcgaaaaggcccgcggcaagctgcgcgagggcttcgaggaggctggtgcgaatgtgtccggtcttcacgaagacgaggacgatgacgctcttgacgacgacctgcaaaagctcttgctgggcgggcttgggggcgccggttttattccgacgcaggagtgggtcaccagctggcagaaggcgtacgtccgagccccatgcctctgtgtctgtccggcctggttcagctgaactttctcactcccgcagccttccgctcgacccaatcctcctgacgatctcggagcttcttccaaaggtcgagacgctgcagtcgagcagcaagtcgcaggggccaaacaaggccgtcattgccttcttgcgctctgtcaccctcctcgacgtcctacccccagccccgccactgattgctcggccgttcactgtgagtgctgccctcctcttgaaaaggcctgccggtagctgtcttactgactctgctgccaccccttccagttctcgcaaaccagcctgatctggctgacgtgccttctttggggcgagacgtacgtcgctggtatgagtccggccgcgctctggaccggcacgcacgtcaagctgtttggcgtcaaagtaagtcaaagcctctgctcgcgtctctggtctgatctgctaactctctgcctacaacttgtcaggcggcccggcccggacgcagcgaggctgcgcttcagaacgtccagtcggcggtgacgtccgtcttccgctcctcctccggtcagggctcggccaacccgccgtcttcgcccgaaccgcgacgacagagctcgactgggtcaacctggagcggccgtggcgggacggtctgatgatcttcagcctgctctcaaaacttccgtgcaagcaggttggacgcatgggcatagacgacttctcgacgactagtagtgcagaggcccaccgtgctttgctttgtagtgagactcgagcgcgaggattatcttgaacgttcgctggcggcccgcgcagtgctcgtgcgggcatttcataatccgttccggtctgatgccgactttgggcggcgattctagccatacttctggtcaggcgccgttcttggtcggcgatcctagcgtccatgttgtcgtccggagaaagttcacagaatcgcgcactggggctgattttgttgcgcaggttgtccgaaatgcgtccgaccggcatcagcgacattgagtcttgactgctgcgctcggtcctcggtcgagcactcgggacagggccatcgtcgtctgagttgtcgagggatgtgagaggagacgaagcggccgacagtgacggatctggcgaaggaagtagattgtcggcaaaagccattctcttgtcaaggactgccattctctcgtcaaggactgccattgaggcctctgagccagcagcgatgaccaaatcgtacctctcttgcggttcccggttttgatcgcgcctgtcgccgtgagtgaggcaggcggagaagaaggggccaagaccgagcctgccggcgccccctgcgtcgcggcgacacccaggaccaagtcgaggtcgttctcagtcgacatcccagccggctgctcgtgagggatggaagcactggcgggtcgccgatgggaaaggcgaggcggacaggccggcggaatggaccgcgggcgcacaagcgcagcttgtcctacggagccgatagtgctcgaccgcgggtcgacaatgtagcagtcgaagccgagtgggactggaggtggtcttagacgatgaagatgggtgtcggcggagcaagccgagtacgagcgtcctgcccccctgtttgcggccggccgcgcgccacatactcgaactcacctcattctcccagccgaaggccaataagccgaatcggggaaaggtcatgagaatggagcaaagatcggcagatacaagtcgcccttagtcacccgcaggcttccccactgagggcggtcagatactggcgcatgagcgcgcatggctctttagggcggcgaaggacaggtcgcccatcacgcggcggacggtgcaccaaacgtgctggtcgaccttggggacggcgtcgccctcttcgtccgtaccgccggtgacaatgcagccttacgagacagtaagatagagaaaggaggtcagtagacgcgcatgcaggtgccggcctggttgctgcagaggggcatacgcactgtgatcgttgagcaagaggcgctcgagtgcgtgctcttcgacgcgatggtcgtccagctcaatgaccgtctcgcacagcgccgggcagtgcgtgcaagtaaggtgccgagggtcgaccatcgattggacgacgtcgagcgtcaagtcgagcatctcctccttggtattgggattcgtctttgggaggagccgggcaaagagtgcctttcgctcgtcgaccgttgggtcgagcgaatcgcgacgggccgccgactcttggtcgagcgaggatgtcgaaggaggatccgggagggataacgtgacggactgcgatgatgactcaagcagatcgagcggcagcggcacggccagtattcggtctgctgatgaagccgagccgacggcggcagcgacagcggctgagctcgttgaaggcatcggggaagagaaggcgccggcctcggccttcacttggccgccgacgggggagcgcctcgctgagctcgtcgtcgatgtcgaagcgggcgcgacgacgagcgccgggattggcggaggatcaggcgaagcggcggccgtgaccgacagcgaggcctgattcgagcgttgccgcttcgtcagcggtgcgacgacctcgatctcagatgacggtgcgggcgagaaagatcttcgagcttccggaggcggagcgacctcgaccggcgcctgtcttcggcagtacgcataattccacctcggtgggcccatgttgatcggctggaactcaccgtttttgcaccggttcggcggttgtatctgccggcctgtccgggttgtctggacgggctgcgcggccggcggcggcgggtcgtcgaccgccggcgtctggcccgagaggagcaccccggagggaggaagaacctcgggctgcagatgctgggcgcgagggctgcacaggtggatgtgcttcgtaaagcgctgagcgggtcaaagtagagcaggcacttggtgcacttgtagccctggttctcgcgaaagacgtcatagactggagagaggccgatcgaaggtcgacacagagttcaccgcgcaacaatgctcaagccaggtggcacctggcccgccaaacttgccgacggtgaggcacttcttcgggtagtgcgtctgctcccattgctgaaaaggctcctggtgcgagccgaagctgacggccgggctgcagagcagcgagcaatcgtagacgcccggctcggctagcgaagggagcgacggccggtcgctgccagagctattgtcgggttgccggccggcgttcgtcgcgcttgctaccgcatcgagctgccggtccaagttggacgagctcgcggtcgcgtcgaacgggcggtgagccgcctcggccgctgctgctgccgtcaccgccaatggccggaaaccggtcgtgacccgagtgacatggcgtgcaatctcgtcgcgaccgatgctgatgatggtctcctcatagggccgatggacgaccgaccgaggctgaggggcgacggaagcgggaggcgcgcgcaggcgatgtagggtcgaggtcgggcgggagcttgaacgtcagccctcaggcgtcagcaggatactctggagcacgactgaccggcatccggtgcggacgagcaggtgtgtgccagtgtaaagggctggacggtcaacgatgggtgaccagaggaaagatgctcgttgtcggtggccagctgaagggcaaccgaggacgcgcagacgttgcgcgtcgcacgtcgaccattcgtgcatcacaagcaaccctgctctcagctttttgacggcagcagtgttctgagagggatgtcgcgagacggtcgcagagacgcgagacttgcgccccttgagaagcttgttgcagaaaaggtcatgggagtaggccggacgagggcgctgtgccgacgaccgaaggatggagaaagagggaggagatacagcggacgcggcgggagagacggccggagagaccggctgcaacgaagagatccgagcgcaggcgagagccaagtagtaacaaggcgagacgagaaggggtccgatgcgggcggagattacttgcggtaccactggacaccgagccgggagcgccgcatcttgcgctggagctggagcatgccgtagaggagagcctcggccgtcggcgggcagccagggacgtagatgtcgacagggacgatgcggtcgcagccacggacgaccgagtacgactgcaggagaggcgcgcaatcgtccgtcagcgatcggcgcaactaatgccagaaggacccggagaacgagagagcatcagacgcacgtaatggtagtagccaccgccgttggcgcacgagcccatgctaatgacccaacgcgggagcggcatctggtcgtagaccttgcggagcgcgggcgccatcttgtttgtgagcgtgccactaatgatcatgacgtcggcctgacggggcgaggcacggaagacgacaccgagccggtcctggtcgtaccgcgaggcggcgacgtgcctgtcgtgagaggaacggagggtcagcagctgagcaattagggaggctatcgccgcggaccgccgatcggggccttgcagctcaagggccacgtcgggcagccgctgaagcacaaagcgacgaggacgtacatcatctcgacggcacagcaggcgaggccgactggagatgaggcgatgagggtcgcaacgaatcgtcagcgattcgtcgcccgtgcggcgcgagctccaaagagggaaggggcgcacaggtcatcggccacatcgaaccctgccgagcccagttgacgatcttgtcgagaccggtcagaacgtactctgcgagacgcaagaaagagaaggacagagcccgatgaggtcggtcagtctgtggccaggcctgtaggcggcccatcgggctcaggcgcctggctcggtggtggcaggcaccatgcctcaggggggcggacgcaccggcgccgttgttgggcgtctcgagcgacagctggttcgagccttgctgggcaatcttgagctcattcggccggttcttctcggccggcgtcaggggcgcaaaggcgagggcctggtcgggcaggccgcgccggccctgggtgaaggggttctcgtcgggcaggttgagcggcttggcccgggcagccgaggtcgcaaacggccggacggcgagcagccgcggggcagcgacagccgagcgagcgagcagcgtcgagggcaggagcgcggcggcgggcatcgttgaaagggggaggatgagaagggtggagagggagtgaggacgatgctccgtcgccctggccaatggggcggcctgcggaccgaggacttcccatctgcattggacccgtcatatagcacaagtcaggtcgcgcagcagccgcaggagcagcctctcttgcaagagagcagccagcccaggtctcggagcagagagcggatgacctgctgggagagaggtaatgcagacctgcgtgtgacctccctgcccacttgtacacgaagaggctggtgcagggccggctaaaccgccaggctattctctgcccgcccctgccgccgattcgcctccgcccgcctactcgccgctagcgttcgttcgcagcgggccgcctctcgacacccacctatcctctctctctcgcgtcgcaaagccagctcaagcatctcccacgaccggccctccgtggccctcgtgtcggcctccgccttccctttgccccttctgcagcgcgggtgcccggaccctccaggctcgccttcttcggccgccgccgccagccagccagctcgaagctcccgcgccgctgctcctctctcccctcagcccgccgcacctggccggtggtcccagcaccctcgtcgcccttcacacgctagacaatgccccctctccgcccggccggcaagacgttcacgccgtcgtcctcgggcgagacggatgacggctcggccgcttcgagctcgggcagcgcgagctcgaccgccggtctgcccaagcacctccggacggtcggccgagtgcggcgcctctgggaggcgaccaagggcggcctcaacttctaccggtgcgttgctgttctcgttccgtgtagctcgctggctcctgagctgctgggcgcagcggagagtcatgcggaagaaagcgggtggcaggcgcgcctgcactgctgttgccgtgaccgcagcgggagggagggctgtgctgacctcagaacctcgctgacatgcttgtctcccttaccttgcctcgcccaacacactacgcccttccttgatgccctactgctgtctcctcctcgcatggtcctggctgatgtcacctcctgccatcctgacctcctcgatccggctcctgccgctgcctgcgcggcggcccctgtgtctgcgtccggactgtcgtctcaaccatcagcctgcacctgctgttcttcaccttcgtacgtgtcactctaagatacgggtcgtctatcctcggattcagactactgacttgctcgtcgacgcacgctgcgccctgccagtgccccttggtgtgtttctcgccagccgcgcatgcgcttacttgccgctaactgcctgctgtacctgccttgcagatcgtctcgggcatcttctacgctgccaacggccagtacaagattccctatatcgactgcctcttctgctgtgtctcggccatgacgtccgtctctcccttgtgctcgcccgtgcgctgccagcttgtcgtctgacacaaactcaccccgggtcgtatcagcgtcaccggcctggccacggtcaatctctcgacactgacgggcttccagcaggccctgctcttcgtcctcatgctcatgggctctcccgtctccgtctcgctcgtcatgatcatcgtccgccggcacttctttcaggtcaaattcaagcacatcgtcgcttcggagcgccagcgccagcgcaaccgcaagctctcgttcggcacgtggtcgaccggcggcgacggccagagtcggctccgaaggccgagcttcctctcgatggctggcggtcgggatcgcttccgctcgggcggcggttcaaacgcgaccgcccagcggcagcagcagcagcagcagcagcagcagcagcagcaagcgaacgagaaggcgccggatgctggtcagtttggctcacgcgctacgacgacggccaactcgtcgcagagtgaaggctgggccggcatgcgcgacgaggacgagggccgcgcggctggactttggcggtcgctcaagtcggccgtcggcttcggccgcgatcttgacaacgagtcgacagatgcggccgaccgcgagctcttcaagagcgccaaaaaggcccgcaaggaggcagagcggactgagcgcggccgacgtgcccagctgcaggacgagtttggcgagggccacattggcggcttcggcggcaacgccggtcctggcggccgaggagagaaggctggaggcggttctggcgaccggcccgtcggcgccgcaaagcgctcgcagagcactggtcccggcgggctgacgacgagcatgatccgccgggtcgagggcgaggtgccgatgctcgtcaactcagccggccttcggggcgggatcgccgtcgagcgcatcccaacgccggcggccaacacgccgaccgacgagcctgacctcccgagggaacttgcgaggtcgctggacggcattgatgatggccggccgagcttccaggagcagcgcacgcggcggctgagtcaccagggcgagcgagtcgtcacgccggacgagttgtcagaggcgaacgtcgacccgtgagtttcgccacggcacgattcagtggccttcaccttttgctgacttgacgtcctcgttttgcctgcagtccccttcctccggctacgccctcgagcccaagctcgcgttacacaacagctcttgcctcgacaccccagcccaccgcaacctcaatcacgatcctttcgccggttgacggcccgcgccgaggttcggcagcgacagacggggcgctctcagcggccggtacggcccaaacgcacacgacggccggcgacggcggcttccagcggtcaaagacgatcgcctttgacccggagcaggttgcaacgcacgaccacctcggatcggcgccgacgagcgcgactgccgtcggcggtcatggtctgccgcggacggcgacaatcgagttccgcggcaagccgacgggcgctgctggggctgacggctcttgtaccggcgagggcatcggccggcgcgtgcccacctcgagtgggaatgctttcgagcgaagtgcgtctctggcagcttctgtcgctctctttcgcaagctgatttgttcgtcgtccacctcgtagccaacacgcgtcggtccgagatgacgagtgggatgcggagcacagccgctgcatcgggtatgccgccgcggtcggcgacgatcaggaccgtcaatggtcggccggcgccgcgcaagcattctggctttggcggctttccgatgccgcacgagattctgcggtccggcatcaagtacttcttcccgaagctcgagcgcaaaattacgcggaccgtcaccttccagcggacggggacgttccagcggcccggcgggcttgcgatgaatcggacagggacgatggcgagcgcccggagctatacgggcacgatcaacccggccggggcaggcgcaccagttccggttccctacatcacgtttgacgccgtcgttggccgcaactcgcgcttccgcgacctcacgagcgagcagatggaggagctcggcggtgtcgagtaccgcgcgctcaaggtcctgctcgtcatcgtgccttccgtgcgtaacgccatccgtgccctgctgtcccggccgagctgacgaagggccgctctgccgcggcttcagtatatcctcatcatgcagatctcgggctgggtcatcttctggccctatatcgacgccaagggcaggtatgactcggtgtttgaggcgcagccgcgctctgtccctattggctggtttgccgccttccaatccgtctcggccttcagcaacacgggtatgtcgcttgtcgacatgtcgatgatccccttccagaaggcctacctcatgatctacgtgcgtcccgccccttggaactcagaactgctttctctcagctgatgcgggacctcgttcgccgctgctgcagtacctcatgatgctcatcctcgccggcaacaccgcctacgtgcgtcggctgccacatcatcttccgctctctgccccggctcttagtcgctgacgaaagttttctacgcctcgtcatcgcagcccattttccttcgcttcatcatctggatcctctcgcgcatctgcccggagcgttcgcatctgcacgagacgtgccgcttcctgctcgatcacccgcggcggtgctacatctacctcttcccttcgcaccagaccgtctttctcttgaccgtcgtgctcggcatgacgtgcgtcggccgtcctcaatacgtctctccgttcaggccgacctgaccccctttcatcctggtcccgcagcatggttgactgggtatcgttcctcgtcctcgatatcggcaccccgtacgtcggccttgggcaaagcctcctatttgcgcccgctgacctcttctcgacggtttctccagcgcgatcgaaagtcttccgctcggcgaccgcatctctgccggctttctccagtcggctgccgtccgagccgccggcttcgccatcgtcccgctcaactcgctcgccccagccgttaaggttctctacacgctcatgatgtacgtctcggtctatccgatcgccatgtcggtccgggcgaccaacgtctacgaggagcgctcgctcggcatgtttgaagaggacgacgccgacacggacgacggcgaggacgactacaaggcgcacatccaggagggcaaggttgccggctggacgcgctatctcgccttccacgcccgacggcagctcgcatttgacatgtggtggctcggtgcgtcactcgacagcgttccttggctcgggcagagacgctgacctgcctcgcttcaggtctcgcgctgtggctcatctgcatcatcgagcgcggccagatcaataacccagcaaatgaggcaaccttcaatatcttcaacattgtcttcgagctcattagcggctacggaacggttggcctcagtctcggcgttgcaaatgtgaattgcgttgacttgaaccgccgcgtaaggctctttgggttgacactctatcctgcctcgcttctcaggacaattactcgctcagcggcggcttcaaggtcctctccaagctcgtcgtcgtcgccgtcatgatccgaggccggcatcgcggtctgcccgtcgcgattgatcgggccgtcatgctgcccaaggagctgctcgaggtcgatgccgacgtcgaggaggagttgaagcagcaacacagccggcgaagcaggtgcggaccaaccttacagcaacgcgcttgcaacgtctttcgtctaacgccctccgttttgtcaccacagcctgcccctgtcagagcgcggccgatccgactctcggaaccggcgcgattcgaccttttctttccaagcgtcgagtccagtgaccgccggccgcgcgcttcgcccgatggcgccctggttcccggccaacggcgacacgggagagtcggctctctcggacgacgatgacccgcccctgccaccgcaaaccatgcggccgggcgtcagcgccggcaagcaccccatcggcgcacccctccctccggtcgaagagcttccctcggccgccatctcgcgccggacttcgcgcgaggaaatgcgctcaattcgcagcgccagccctaagtctcgatgacccttcgcccctcgtgtcgggcggggcctgcacgcacagcgtcacctttcacgcgtttccttttgctccggtctctcggctctgtcctgcactctcgcctagactggcctttatcgatggctgttgtacgatctagaggcatggcgataaggttgcaaggcgatgaggggcgaagacgaaagacacaggaatttagaaggtgcacgagccgcattcggtgacggtcgtcgtctgattgccactcgtcgtcgaccggttgacgttacctttaagttgggtgcccgagaagtcgcactttgtgagcgcggcgttctcgcagaggtcgctcgatagctggccggagagggccgagttttgcgccagactaagcgtcgccagcgacgcggggaaagcattcgggagcgaagtgagcgcgtttgaggtggcgagtagtgtagtcaggctcggcaggtccaagatcgacgagagcgaggtcaaagagtttcgcgagacatccctgcggagcagcgcgttgaagacagaggtcagcgcgggggatcaggaagctgaggatgagctgacgcacaggtaggtcaacgagcgcggcagcgagccgacggggttgcccgagagtgactggccttggacgatcagcgacgttaggcccgtcgcggcgagaccagtcggtagcgagctgccgagaccagcattgccgatgaggatgagcgactggagcttgcacgtgccagagaatgccgtgttggggatggccgacgacagcgcagtgtcgacgaggctaagcgacgtcaggttggcgagggagtagatggtcgacggaagcgagccggctgaaggtgaagataaggcttcagagacgctgggctgagggattgggcgagagtaggacgtacagggtaccgagtcgacggtcgagcccgagatgaagatggtctggagggatacgagattgccgatcgccgacggcagagtcgcaggaactcctgggaaggtcatgttgctgagggcgatgcagctggcgtcagtagaggatagtcggaaagtgtggcagctaggacgcacagctggatgatccgcgccgactggtcgcagttgatgcccttccagccgcagatttcgccgaccgcgccgctcgtgccctggaaccagccaatggcactctcggcagcaggcgtcgcctcgtagagtgcgcggaggccacaccactgaagggcggcaccgacgccggccgtcccgcccgtcgtcgtccagtcgctcgtcgccgtcgtcaagaacgggttgcaggtcgagcagtaggaggtcgcgttctttggcgggaagtcggcgaggcaggagacgaggtcgatgacgggcggcggcggtgctgctgaagatgaggccgccggcgaaaccgactgggttgccgtgccggtcgctttggcgtgcgtcgttgtcgaggtcgaagtgacgatctccatgaaggtcgacgagcccgagacgacagcccgagtctcggtcgtctcggtcgttgacgtcgccggcgcagatgatctggccagcagcttcccaaaaaggacgccaataccggcaccgagcaagacgagaatgatggcgaggatgatctgcggcaggatgtacattggctcagtcgtagcttgtcaaggtgagagtgcagatgagtcaactcacccagaggttgcgacggcgccgcttgcgctgagcatcgtgagcgtcggcgatgtcaccgccgtggggtccaccatgaccaccaccgccactgccatcatggccgctgacgtcctccgacttgtcgcgccagaagagcatccacgggtccttctccttcttgatctgaagtgggctccacggccggaggtcgtccttcacgccgacaccgccctcggtcaaaggagccgcgccaacgggcgcaataccctgccagatgcgctcacgctcgtcttctgcctcaagctcgcggtcccatcggttgagctcgcgccggtcgccctcgagcctgcggagctcgcgcgagacggccttgcgcgcacgcgacttgtcggcctcgccgagaccgaggcgaccgatccaggccgagacgggtgcgagcgagaatcggttctggcactggcggcctgagtgtgggttgaggagcggaactggcgtcggagcgacgtcaacgaacgtggcaggcgaagcgcggcgacggctgctctccttgctgcccgtcagttccatcgaggacgcgtaggggtcggtcgggctgggccggggagagaggcccgtacgaggcaggggcgtcatcgagaggacagggatgtcgtccctcggctgagcctgaagcacgagcagctcggtgaagtcgagcggtgggggccgccgagcttctgcaggaggagccggctgagagacggatgtgccccagcgcttaggcacctgcagttcgggcgctttgaaggcgatgggcgagccgtattcggttggcggatagactgtcgtgggcgagtagtcagctgttgaggcttgacggccgtagcgagtcgggaggcggaagcccgaggctgacaaggtcgacgacgaagagggccgggcttgatcgcgtgctggagcctcccggaagcgaggattcggcaggccaagcggatctgaagaggcgagcgaatgctcgacgtagggcatgctgatggcagctgacaaggtgctgcaggtggggcaagagggagcaggagaggcgaggcagctggctaggtcgcggggtgggtggcggtagcgagagaagacccggccggtctcgcttcaaatgggaagggtcgtcagcgaggactcagcagcggcattgtcggtcaagaggcggtcaaagggagcccaaaggacaaagggaggtcgcggtcgaagggtccggtcggtttggggctcgcgccgcgaacaagaggcgcgcgccttgccccttgaaacgcctcaatttcggtcggtcccgccgacggtgcagacgtgcctcttcactgtcgctgcacctgcttcgcactcgtcgaaggccttttcagctactgctctgctaccgccaatcaggagctctcgaggcgccgacaaagatcacatacgacaaatagcctccagatacctctaccgggagcctcatttctgccctcacagcttgctctcccctaccggcagccgccgacctccgccacaggccgcctcgagctcgagcttctccttgaggccgcacttaagatcctcccgatcgcacaggccgtcgagctggagcagcttccggccagcgctgaccccgggccggaggtcagcgccaaggtcgccgccgcgggcgaggaacgaaaaacgttgagtgaggacgggcgagagccggttgtggaagcggtcgtggacgagccggccgaggttcggaaggaacttgaaggcgtggcccgagccgccagttgcaaagaggacattgtcgaaagcgggatgccggtcgattagccaatcgccgttgctcgtctcgctatacctgttggctcgaagatcggtcagcagaccggagcagggcgggacggtacgttcgacatgaagcgcagggacggaccagcacatgcgtgtcgcctcaaagtccttttgtgcgaggcgaggaaagaatttggccgctctgtacccgatcgccgtgtcgaccgctgggggtcagcgccagcctcaaacagcgctgcagcggaagggggcaggcgagactcaccccttgcgaatgttgtggaccatctctttcggaatattgccgtcctcggcaccaggcgttaggacggtgcgcgggaccgagcagccgttgctgttagtatcagggttgatgtaacccaggtggtgaattgcggtcttgactacgccgccgccctccgatcgggggccccttgtcggggggaagacgtaggccccgtctaaggaaggtgaagggtcagcaggcactcgtgaaacggctcaaagagaggctcaaataggcaaagctgtcgcgagctgaccctcaaagtcctgtaaggagaacggtcgtcagcgtcatgttgaagaaccgagcagcaaaagagcaaggacgtacccaaatgacgggcatctggtcgtggacggcacgctcggcgtcggtcaggacccatttgccgaccgactggccagatgcggtcagaagcgacgagcagagaagctccggcgagtggaatagggaaggcgtcctgtgcgagcgatagacgagcagagcaactatatgtgagccttctggacgataattcttgtgcgaccgctttctgcacgcaccaggctccggtcgcgacaattacgtggtcggcctcgatgacctcaccgccgacgaggcggacgcctgtcaccttcttgccgtcagcgacaaagccggcgacctccttgccgccctcgatctttccaccaagcttctggacgcgccggtgcccaatcttgaccgcccgagtggcctcgctccagcccgcgaccgggttgtagtagcccgtcttgttggcaaagttgccgaccgcgtcggccagaccgcgttcggaaaagtgggcgcggattgcctctggcgtcggcagggccttcggcgttatgccgagcttcagcaggttgtcgtatgcctccttgatccaggagagatctttgtcagctgggccgatgaccataataccctggaaaagcgcaagagacgatggcttcagcacaaggggcgccagcggtcgagtgaagcgtgagagggctgacgctctcgtggtatgttccctcccactcgggcttccgccactcgttcacggcctcgaacgacaagcgggccatctcgaagtcggcctgcgggtgcaggggagggaaaagggcgtcagcaggttggacgtcgatagatttgacgccatcggacgcacataatcgccagcgcgggtaatcttgtttatatccgagctgccgacaaggtagttgcggcagatgatggtggtgcgtggtcgcgagcgagccaacaagacggaagatcaagtgagagtcagcgtcactatggtcgatcgagtacgcacgtagacgtcgcccgacaggcgaccggggcgcagagcgacggtctggccggacagacatcagaccaagctggagatatcactcacctcgcagcatccggagcgggctgctcgaccgactattgagagcagaaggaggcaaaagtgggcgtcagcgaccgagcctcgtctggtcgtgtgcgcgcaggcacgagcgtcgcaccttgtcgataatgcgaacgtcccagccaccctcttcgaggaaggagatggccgtgctggtaccaaagacaccgctaccgacgatcaggagcgagtgaccatcggccggcatgctgctgaacttgcgacgaagggagctgggagggaggggctggggcggagctgcggagagcgtcggccgataagtcgtgcgagcagagaagaggtgcgacagtggcgggaagaaggcaggatgagcaggacgtgtcagccctcggtcttgcctcctagcctgacagtcgcgaactgcgacaggagtcgtgcgtcggtacagggctgagccggctggctggttggccgctgcctgtccctacaggctggcggcagttgagcgccgagcagcgccgtgttcgtccccaagccctcgtaatctactcacggcaggaggtccgggtacgggacgtgcgaccgtcgagcgagagtcgggcacgggagaaagagagagcggtaggcgggtggcgagcaaagtcggaaggcggcagcagatagcgattcagggccaggactccgtccctccgagcgacaagagctggtgagggcggcgcgtcggcgccgacggtcttcgggctcgcaacctccatcagcctcgcctctcaattgccttgcagcagcccgaacgccaacatgaacgcctctcacgaagtcggtctcctcaaggtctgtcaccccgatgtttatagagaagggcgggcggggacggcgtcgggaccaaccagccgacgcgctgcgcaggccgccattgcttctggcctgacccagttgctgctctcgacagggggagattaagcgcctcggcaagcagaacgccgacggcaagtggacgtgcaccttcggagtcctcgtcaaggatgatcgctgtgccaacatctgtacgtgaccagcaggctcgtcgcagcttgacgatggccgctgacccgtgcccgaccctcccgccttcctcctcgactctcgcttctcgtacgcatggatccaccgccgccgacgtcgcccggttcgctcttcaacctgacctctggtgctcaaagtcgagggtacgaagggttcttctcatgtgttgttggccgccactcgacctaacccatcttctctcaccgacgcgcagccctcgtcggcacgctccggtcggccaagcggtcgaaagtcatctcttaccagtccgagatgcttctccaggtgcgtctcgacctgccgagtgcaacggattgcactgacaccacactgtctggccaacgcagggacgcaacgacgacgaggagatcgtccttctgcaagaataggcaaatccggtcaaacgaggtcatctgctcttcttcctcgcgcggaccgcaaagccgcagtggcagtcgaccgctaaacggccacgcgtctgatgaagcaacctgtcacggcacaggagctcgtaaatcgtgaggacattccagacgccgagccggtcggcgacccttacctcacctgcctaaggggatgcgatgctcacttctcgcggtcgagcagagggcaacgatggcgcatgcagacgtgtgtgtaggtggagttgctgctcggcggtgcgagcggtaaggaacgcagaaagcgggacgaagcaaagatacagctcgaagggaatacagcagatgggggggcaagtgaacaactagtcgcccgcgcacatgaggcgggcggcggtggttgagatgggtacagggagatgagcgggtctatcccagattagaaagcagcgggagaatgttgatcctaagggatgggcgtcaaggtaaaggtcttgaggaagcgcacgctgcggttcgacatgcgccggaccggcccgggatgaggtgcgacgagcgcctcgtggtggccgtcttccgagctggctgccgagcccgagacggaggaggaggagggcgtcggcaatgttgaggatgtcgcaccgaccggatggccgtcgtccgaagcaaaggaggacgagcgcgacttaaggtagaacgacggccgggtcggggtggagccaggtcgaccggcagcaggcgccagttcagggctgcgaggcccggcccttgccgccgattcgcgagccgagatcgcaccaaactcgccagagagctcgagaggcgaaaccgggtcgaccggagcgagcgagacgggcccgtcaacgcttggcgaccttacctgcaaggccatgtctgggacgtccggcgacgactttgtcttccggcgcgagaaggtcgacgtgagcgagcgccgcagaatgccggtccgtgccggttgcgaggcgactgcagccggatcgactggtgccgactcgggcgagcgctcgagcgactgccgaggaaacttaatctcccggtcggcgagcgcgctcggcggcgagaggatcggcgacagtgggcggtgtccgaccgggggctggctgcgagggaaccacgagtcaacgacggaggtccggcgcggcggaggagctgaggcggcagaggccgaccgcagcggcttcgttgggctcggagtgatcggcgtgatgctgaaagcggcagcggaacgggcaggcacggcgaccgtcgtcgtcgtcggactctcgagcgcgacgggcgactcgctccggggcggcggcggcggcagcggatggtgaaagagcggggcgagcggcatgacgggactcgtcggcgcagttctcgatcgggcccggtcgctctttgtccgcgctggcgacctcgccagcggcagagccgggacggccgatgtcgggcgcgagtcgaccgccggccagtgcgtcatcagcgacgtccgccggaggaagctctcgcgcttcaggccgacctcagacttggtccgtggcagcttcgcggtcgaagcagcgggccccatcggccggtcagccggtgcaggcccgtcgacgagctggctgttgaagtcgaggatgcttgctcgacggcgcatcgacccgttctggtggcccatcttgcgccggacagacgagacggcggcgccgatggtcgaagacgaggtcgtcgtccggtaggccgacggcgcgaacaggaccgcgccctggcggagggcgttgttgcgcgcagtcgagcacatctcggacatgacgtcggccagggccttgtcgacagtctcgcggtatgaggccgggctccggaggaatagtgtctgatttgcgaccgccggcaagggcgcgccgaccatcgactcgcgcggcgacgaaaagggcgtcgagttgaccgacacgtcggttgacggcgcgtatggctccatcggcgagccataggcgccgttggcgtcctggccggcagaggctgtcgtcgaggccgtcgtcgtgctgccggccgagcccgagctcctcttcatcgagagcgatgtcttgaccatcaagggcggcgcgccttgcgacatgcgccgagcgatcgtccgcgaagtgaagatctcgggggccgaggacggcggcgacttgagagccagcgtcgggctcgcctgcgctagccgcaggtgcgagagccagatgtccttctccttggcgcaagcggtcgagacctcgaggaagtagccttcaccttggaggcggatcgagtcggcgaggtaggctgagcgcggtaaacgcaaacaagggagaaggtcagctctcatgtcgaaaggggcagcacgacgagcagcggcggacgcacccttcccaggttggccttcagagatctcgagccgctcgagcggcaggaagtggagcgccgtgtagattttgcccttcttggccttgcacaggacgaaaaagccagcatagagaaaggcggcgaggtagcggatcttgatcggcgtcgagatgggcgcctggactggatgatggtagatgacgtcgagcgagccgacgaggaggcactcgccgagggcgctgagcacgccccgcgacagtgtctgtggcaagaggggcaggcgtcagcgtcttgcgtgaggccgagagggcatgatcagagaagacgcacggcgtgaccctcgatccggttccgaatgacgcggctgcgttcgagcgagatcttgcgcctcgtcgcttcgtcgacgctaccggcgacgaccttcatgacggccagagcctcttcgaggtcctcgccgccggtcggccgctgctcgcccgagaggaggtcgacaaccttggtcgtccgcatcgagtcgaggatgagcgggtagcgacagatgcgctggattggcttgatcaggaggtcgcggagcatgagccgcgacgtcttgcgctcgcggtcggcgacagggctggtcgcaagggcggcggagagcggtgcccctgttgacgaggaggttggcaaggacgaggcgtgccacttgaaggacgagcggcgggaacccatctcgggcgggaaggccgactgctcgagcaggctggtgaggctcgtccgtggccgcagctgcgagagcgtgctgcacttgcgctcgtactccatccactggaaggtgagctcgtgatggcggatgaccgagagtgcctcctcgtggccggtgcagtactcctggtaggcggcgaactcgtcggcctggacggggggggggaggggcggacaagtcagtcgcgctaccataacgaagccaaaaggtcgggatgcgacgcacctcttcgacaaagactctcgagatgcgccgggcagcccggtcgagatcggcatcaaaaacgcgctcggtcgggtcgtctggcgagcggaggtgctcctggctcgcgatcgcgacgagcgactgggtgaagcgcttgtggatgacgagcaggtcgagcgtgtttcgggcgacaacgtcgcgacgctcggctgtgaaggtcggcagcatgaagaggtggtggaggtagatctacggcgagaaggcaccgaaagggacgtcagagtcagcatcctgagcggcgcaagggacggattgagaggaagcgcacctggacgagcgtcacaagatcgtcggtgtaggccacctcgccctcgacgaggtcccacaactgacaggcaagcttgctcgccttctcgttgtggctgtcggcgtcggaccggataccatcgatgccggccgtcggcgactcgccgatgagcgagcgctcctcgagcgggctgtcgagcgacgttcctggtgcgctgctcgtgtcggggtcaagctcgccttccgagtcggtctcgaccgccgagccctcgaccgtcggccgccttcgtcgcctctgcgatcgtcggcgactctttgtggccggttcgtcgtttgactcaaagccgccgccgatgcccgagctcggcgtgtcgcatgcctcggtcgtcgtcgccaggctcgagcaggtcgccgccgtgtcctcggtgacgcggctcgtagacgaggccgaggacgagcacgacgaggtgctgtgcgaccgaaacgtctcctcgccggtcgaggtcgaggaaggcagcggcggcaggggtttgcccaggagcatcgcctggtctagccgaatgttcggaagccgcgcgggcgtcggatccgacgttgaacgcttgcgaaagagcctcggcggcaccgggagcgaggttcgagcgacgccggagcccggcggagggtaaggcgaaaatgaggtcgacgacgcgggagagaccttgccagcgacgagcaggaggccggaggggtggacaggtccgaccggggtcgttggcgagcgttcgtcggccggctcggccagggcgcgctggacgacgataggagaagccgccctcttgggcgagtcgtcgatccggatcgtcagctgcgaacgcgaggcggccggcgcaggcgcaggagaggcgtcggtgaccggaggtgaggcggcgccgggccacggactggcgagctcaagcggcggcgggagggcaaaggccgggtagtggccgctaaagtagtcctcggatgcggaccgggccgtcggcgaggcggcgagcagcatccgtagcgtcggcgacgaaggcaggagctgcttgccgccgccacttgtctcaaagcagccatcggagcctgagcttgacgggtaggcgctcggcgaggagggcgaggttgccgatgtcgaccaccgttcgtgcgagtcgcccgagttgtgcgcgggacgcgaaggtcctgcctcatcactgccgccgtctcgagcgagagcgtcggaacgaccgcgcgaagggccgacgagccgccactcgttcgagccgaggttgttggcgcttgccgctcggcggacgaccggccgactcgaccgcgcgacagcgaccgtcggcatccctggcgagctaagggtcgacaagggcgcttgcggccggctcaccggcggcgagagctgtgaggccggtctgctcgagttgctctcggcgacttgctcaaggagagtcgagggcgtcgcggtcgttgctgctgaaggtgagaccggacaccgccggcgcatcgtcgccgacttttcccgccgagcaggcggcgccgccgacaacacgagcgaggcgagcgccggtcgaggcgactgggtcggcgagccggctggcgaggccagaggtgacgagatcggtggcgaccagtaaccgcgcgcagctgcgcctgcgcccggcgagccgaccgagaccgagagcgccttgcgaggatggcgcgtgacggtgaaggacctcgtgctcggcgggatgagcgctggggccgactcacgccggacggtcgagctgctcgaggccgaggacgagcccgacgacgaggcaacggaaggcgggccgagggcggtcgtcggcgaccctggtgaagagacggccgacagcgctcccggcgaggccgaaagcggaggggcggacgatggttgggccatcgggcgctcctcgggagaatttggcggcaaaggacgatccggtgagctgcaggtcagaagagagagagagaggggtgagctcttcgcagccttgagtagggtgacgaaggggcggagggaaaccgccggctcaggaacgcacgacaggcccgaaaatcaaacgaagaggagatgcgcagtagagaggcgagggctggagggcaggaggagagcggtgcgggagccaggtgggtgcgagcaggcggccagatgcgaggaacagctgcgagaggacgagccagagactggacgggtcgccagggaggaggtcagtctcgctgctctgagctgcctgagacggttgggctgaccagcactctcgcgcgcgcgggctgctctgagactgtccgctgggacgcgcgacgaagaatgaattggactgacgctagaaggcggagcaggaccgatcgatgttgcgagtagcggcgaacccttggaacggcggcgagagggcaaagggagagagggcggccgtcgctgctttgcttggctagcgctgggcttgagtgcgcggcgggtcccgtttccgggggtctgtgacgacggaaaggacgagctgcgaggcgtcggacgaaggcggagtggaacctctcacgacgcgacgggcgagagagcctggacgagcagacggtcgattacggtccgggcagcgagcagcgagggcgggtacgagcctagagcggcggcgggagaatcgcagggagggaggaggaggggagcgacgggcggcgccaccgtcgagcacacgtcgacgcgcgacttgcagctgctgcttccgggcgacgggtcgacgatgggccgagggtcgctgggcctgaaaggaggatgctggccgatgctgagagcgcttgctgcgaggtgaggagagagagagctcttgctggctgggcgctgctgctcgctggtcgggaggagaggcagcagctgcagcaggagatgctgctcctggccgccgtcgtgctcattgctggcccgtcgatcgctcacgaatcggcaaaccccgcaaagttggcccgctgcgcccccgcagctgcttgctctgctgagcgagagcgaaaaaaggagaccctcatccaggaagagacggcggcagcaagctctggccgagagtgacgacatgaaggcgccgacctgcaggccttcgtcgagggacggtagcctcgcacatgagagctgatgcctgtcctgctgaagaatccattgctctttgcgagcgggcgaacacaccgcgagcgaacagtccctcggccccgttgttcggccgccgtctctcgccggccgagccattcgccaagagcaaagcacttgagcccgccgactgctccgcagcaagatgtcggccaggcgtcggtcggcacgagacctgctgcatgtccagcttgagcctgcgccctttccggtgtgacagtcatgacccagccagcagtcggccggcagcgcaacgacaactgacgtcggcctttcgctcgtccgcatcagtgtcaaatcttgtcaacgtgcgcaggcggtagacactctttcgtacctcaactcgctcgtcagcgctgtcggcggcgagccaagggcagccccttcgactcgaccgtcttctgctttctccttgagccgcctctctcctaggcctgtaggtccgatggcaaagcttcatgtttccatagatggcacaacggctgttcagacgatgacgtggcccgaggcaacggccagctcggcgttgatgacactctgttgggttgccgaacgagctggtcagtgactgcaggctctggcgggacaaatagcagagcacgcacgctggtggccgcgccgatgcggacgttgtcgctgaggcagacaaacttgatgtcaaagacggggcactcgcgcacgcgaccgacgacgacggtcgcgccgtcctcgaggttccggtccagccggggctgcggccggtcggcctcgtcgctgacgagcaggcagtgctcgggcgccgacggcaccttggtcttgccgagcgcctgggcgagcgacgagtagttgcgcatggcctcgatgacctgctccggagaaggtgcaggccggcggacgaacgagaccgagacgcactcggtgtggccgtcaaggacggcgacccggttgcacgaggctgagatcttcatcggcgactcggcgtgataggtgaacgacttcttgtcgtccgagaccccgccgagaatcttggacgtctcccactcgatcttctcctcctcgccgccgatgtaagggacgacgttgtcgaggacgtccattgaaggaacgcccgggtagccgccacccgaaacggcctggagggtcgtcgtgatgcacttgtcaatcgggccaaatgcctcctcaagcgccttgagcgggacgacgaggccggtcgtcgagcagttggcgttcgtgacgatgaagcccttggagagcgagagcgtctcgcgctggtaaggaatgatgtcgatgtgcgacgggttgaccgtgggcacgatcagcggcacgagcgggtcgcgccggtagttcttggcgttcgagaagacggcatactcggcggcacggaaggcctgctctggataagcggaaaaggatggcgaaggggcgcgcgacagacgtcagaagagtgcggcggaagcagcctggcggtgcaggagaggaggagctcaccgatgtcgccagcgacgtcgtggtcgaggcccgagaagatgatggcgcagccctcgaagccgtcttcgggcgcgcaggtccggacgatcatctcgcgaacggcggccgggatgggcaccgactgcttccacttggtcgccttggggtaggcctggccggccgagcgggacgaggcgccaagagcggcaatctcaaagaacgggtgggcggcgagaagggtgatgaatttctggcccacggtgcctgcgcagaatagagagacgattacaggtcagctgtgctgctgctccaggcgaggccatgttgaagcggccgtcgaatgctcaaaggtgacgtcggccgacgggcggcgacaggcagcggaagacgcaccggtggctccgaggatgccgaccttgatcttggggctggaggagaagggagacatggtggaggctgtcgaggcgctgacgagcgagtaggagtacgagactgagagaggagggcaccgggccgagcaaaaggagcgagctgttggtgagcgttcggagggaggtcggccgggcgagcggtgcgggctgaggcgcgcaggcaggcaggccacttttcctcggcgccagcgtgcgtgctcgtcgagtcacaccggcgggcagctcatagtcatctttgcctgtgcagctcgtcgcttgccgcctcgactgggaacagtagcaggaggctgctgctgaaggccgagtctgctgctgccacacctgcggcgtccgacctccccccctcgctctacgcagcccctcccctcaaaacctcgaacggaagaaaaagaacaggtcatgatttgtcggcagcacgcccgacctctccctgcgtctagcaaagccctcctcctctccacttgcttacccgcccgccgccgcggcgcacacctcgcaaaaggccgagaagaagttactcggacttgagggcaggggcctggagtcccttggagaagcccttgaagccggcgtagagggccggggcgcccgaggactggctgatctcctcttcaatccgtaggagacggttgtactgttggttggttgaggaaggggcccccccctcccccccccccctccttatctcgtccaacgcgcgcactctactgcttgcggtgcgactggtagtagtggatgataccggtcgtctgcgagggaggacatgggcgtgtcagcagatggctcgacaggcgagacgcgctacgaagtttcgacgcaccgaagagtcgtgacccttgacagcctcgggcgagccgagctgagcgagaatgttcttggcgaggaccttgccaagctcgacacccatctgatctgtagggcgggcaagacggagagggtcagccgcctgaagatgccagagggggaagaaggagcgcgcgacgaaccgaacgagttgatgccccagatcatgccctgcgtgaagatcttgtgctcgtacatggcgacgagcgagcctgagagggagaaggggatggggcgacaggtcagcgcgcagttgatgacaagagcagggcggtacggcggacgcaccgagggtagcgggcgtgagcttctggaacatgatcgagttggtcggcttgttgccctcgaagaccttcgacttgagcagggcagcgttcgaggcggcctcgccgagctcctcccgaacctcgtcctcagtcttgccaaaggcgagcgcctcgggctgggcaaagaagttggagaggagaatctcgtggtgcttgccgccggagatcgggttgagcgtctcgaccggggcgagaaagtcggccgggatgagcttggtgccctggtggatcagctggtagaaggcgtgctggccgttggtgccggcctgtccccagatgatgggctgcgcagagcgaggtgggtgagcgggatcggctgcgcgcggtcagagacgatagacgagcggacgtacgccagtctggtagtcgacgcggctgccgtccttagtgacaaacttgccgttcgactccatgtcgccctgctggaagtagtcggcaaacttgtggaggtactggtcgtacgggaggacggcctgggtctgggcacctgtggatgtacgaaggagggacgacgtcagctcgtgcgcatctatagccgggcgcgagaagcgcgcgacgcaccgtagaagtcgttgtaccagatgccaacgagggcgaggatgacgggcaggttcttctcaagtggcgtctccttgaagtgcttgtccatctcgtgcgcgccggcgaggagctgctcaaagttctcgtagccgatcgagagggcaatcgagagaccgatggccgaccagagcgagtagcggccgccgacccagtcccagaacttgaacatgttgtcggaagagatgccgaaggcggtgacggccttggtgttggtcgagagggcgacaaagtgctttgcaacgtgggccttctacagagggcgaagggagcagaaggacgtcagctcgcgcgcgatcagtcgggcaaccagctgagcggaccacgtacgtcgccagctgtcttgaggaaccagtcgcgggccgactcggcattggtgatcgtctcctgggtagtgaacgtcttggaggcgatgataaagagggtcgtctccgggttgcactccttaagctcctcgacgaggtgcgtgccgtcaatgttcgagacaaagtggcacttgaggtctcgcttcgagtagtccttgagcgcctcggtcaccatgaccgggccgaggtcggagccaccgatgccaatgttgacgacgtcggtgatcgtcttgccggtgtaacccttccactcgcccgagcggaccttgtcggtaaactccttgatgtgggcgaggacctcgtggacctcgtcgacgccttcctcggggatctgccactttgacaggttgcggagcgcaatgtgcaggacggcccggtcctcagatgtgttgatgtgcttgccagcaaacatgtcgtctcgggcctgctcgacgtctgcagggcggcggcggggacggcaagggggggcagacgcggggtcccaggggctctctgcgtcagcgggcggattcctctcccccctccaccgagaaggagtgacgcaggcaagagggaagggactcactggcctccttggcgagcgagagcagcgttgaccagacatcctcgtcgatcaggttcttcgagtagtcgaggaagatctcgacctcggagccggcctcggtcgagcggttgtacgtcgcctggaactgctcaaaccgcttggggtcggccgcaaagagctccttaaggacgagcgacgacttcttcgagtcgtacaacgactgaagcttcttccacgacgagaggtctgcgaggcgaacgcgcgaggcggagagcgagcagcagcaggcagatagagagccatctcggcgttggtcagccctcggggtcgcgcgaagaggagcgagctcctggccttgggacgctagcgagacaggtgacgacgcactggaggcgagagacatgacgtgcgagaggtaggtgggttgggaagagggagaagagggtgatggtggtgaggggtcggacagcaggcgtgttggccgggcgagagctgagctcgccatgccgcccgcgcaggccgaccctttgattttctttttttcggccggagaagcggcgccggcccgcctgcagtcttctccgggccggccagcgcggcctgagctctcaaagctgacgccggcagtcgacggcgaaagcagtggacgcaaaggggtgacgggttgggtgtgcatgaaatatgatggtacagggcgcaagaaggaagaagacgcagatgagcgtgctcagcgcttgccagcctcctgcggcttgtcggcgactgcgagagggacagaagagggcaagggcgtcagcagcatgaatgggcgttaggttggtaggcggacgcaccatcgagcaggagcgagctcgagtcgagcatgacccggttgccgctcttgctgacaatgttggcgatgtcgcgctagacggggcgagcatggtgtggatcgcgtcagcgaaagggcgccggaccgcgcgctttacgagagcggcggaagagaagtcgcgacgcacagcagcctcgagacggcggagcgcaaggaaacccttgttggccttgacggcgtcgccgatgagctctgccgacttggcctctccctgcgcacggacgatgatcgactgcttctcctggattgcctggtcgacgaggaaggccgcccgctgggccgtctgctgcgcaatctgcttggctgtcgggggcgtaagcgaggcaggacgcatggatgtcagcccgggagcagaagcgcgttggacaaggccaaaggaggggcgcaccctcaaccgcgtgcgtgaactcgggcgaaaaggcgacgtgcgtgatcgagacgtcgtcgagcatcaggttgaactgatgtgcccgccggacgaggttctcccgcaccagccgcgaaacctgacagaaggaggagcgcgagggatgtcagcggtaggacagcgataagctaaccagtttgcaaggcttgggcgcacctgctcgcgcatcgtgatgatctgggcagcggtgaactgggcgacgaccgacttaaggacctcgttgacgatcgaaggtaggaccttctcgtcgtagtcggtgccaagctcgcggtagctgatgaagagggcgggtagagcgggcgtcagctccgcgttcactcacgcgcacgcgccgcctcgccctgacagagaggagacgcacatggtcggcaggttctggacgtccggccgcgacaggacacggcacgtgatgttcaccatctgcaggtccttcgttccggtgagcgaggcgatgttcctgcagggtgcgagcaatgggtcagcagcggcagcctcgaccggaagctcctcgaggagacgcacctgggcttcgcccggacgtcgaagtctatcggcgtctgcagccaagggatctgagaatagcggagcgaagagtatcagcgactaacgaagcgcgtttgcaaatgagcgagctgacgtacggcaaagtgggttccctcagggtagatcgtgttctggatgccagcaagcctgcgcgtcgaccgggtgggtcaagatcagctctccgatcggcctcgatgaggagccggcgacgggcctcaccgagtgtacatgatggcacggtgacctccgtcgactgcaagcataacacgcgagagtggaggcgaccgatgtcagcatcgaaccgactggccagccagcacgcaagccgcagtgaacgcaccgttgaacagcgacgactggacgacgaggccgccggcgatgagcaggccgaggccggtgccgccgaggagagcgcccttgggcgggacacctccgcccgcaccgccgcgacctccagagaagccggacgcccgtttctgaacctcgcgagccatcttggcgagcgcatcgcgacctggaggagagagcgtccgccaccgtgtttccggagagagagagggagcagagccgaggggtcagcgaagtgacgatcgccgagctgccgcgacgagcggtccgcaccctggtttgacatggtgggtaacgagtcggaggagaggagggatgaggagagagagctacgaagagtacgggatcgaggaggcgttggagggtcgggcactcgaagcggtggaaggtgcagctcggccggccgggcgacgcctcagcgcgcggcaccgacctcgctgcgagtggatcggacctgtagccgtgcatcgagcatgaatgtcggcttgggagggacaacagggagctcacctcgacgtcgaccccgtctccgagggcagtccatactttgggcacgctgacacgcctggactgatgcagaccggccggcgcggcgggtgtcgttgcgagcgagcctctaccgcgacctgcaatgcgactctagggcgtcgacggcgagcgctgcctctcgggcacaacgcaacgccgcaacccagctcgcaccggtcgccggtcgctcaagagaccgaccagcctgctgctgttgtgctcgacggcggcgagattcctggagcgaacaacttccccgctcaggttggaggaaggtcgcacggccggcattctcgatcccgctcgccgacctgacggcgcgctcggcatgacggtcacgtcagagcgtccccaacgccgaagctccttatcggcgcctccggcgaaggttactcgagcaccgatcgaggctaccgagcagactgtcggcctcaggcttcagtttgcaactgctcgtccgcggcctggacgcacgttggcgactcgaatagaggcccgtgctgcttcgcgagagctgaccgtccgatgcttgccactcaccctgaccgcaactttgcctctcggctcagtggagggactgcaggcttccgagacgaccgagacgacctcgcccgacttgtcctcagtgaccggggctgctggtcttgcatgctgacgagcctcagccacctcgggcaacgtccatctctctaggggccgagcatccgggcaggaggctcaacagagtcaacagagagcggacagagggccagccgtcaaggttggtgtcaaggagagttggctacatgtcggagtcggaactctggaaggctgtcgcaagatggagagcgatttctccggccatcctctgaagaaccaaccgtcgcctccgagaggctgacgagccgaagacaagctcgggcccggagggtggcgggcgggcggtgggtggggctgaacttccttcggctcggccgcgagaaggcgaatgaccgacggtcggggccgtcgcatggtttggtctcgagggtatttagcctttccgtcgtcggctgcgagagggcgcaagggcgtcacaacaggcgacgttgttccctgcgctgccgtccttctgccgcacgcacgccctgcagatgaatctttactttgagagggaacaagaggtcgaagcctcttcgatcctcggaaaagcctgaccgacacgccgctcctgaaccttctggccttgcctcttcagtctctgcaggacaagacgtcgaagttcagcgctgatccggcgtgggaatgggggccgctcaggacggacgacgacgaagaacaaggggttgtcacccgttgaggtcgcggggaaagtgctggagtcaacgcggggggggggaataaggacgacgatctgtcggtcgtcgagggatacgcgccccggggcggccgagcttattgcaggccgaccacggccagaaacctctgcggacggtcgagagttgaactcgcccgccgagccaacagtcgggagggcaacagacactgaagtcaaccggcggacgctgtccttaggctgctcgtcgggggtcgtgtctgagagagaatgagaatggttgcagcatgatcgacctgtcgcccggcttcgcgggcagcctactacgtcgcaaaagctgagcgagagtcctcggcggccgccctgccatgcttccactgagctgggccctcggccgctcgccgacaatagagcagaaagctgctgaagtacctcgatgggcgcccgagctgtcgaggaacggcttagcgctcgtcgtcgtcgtcgcgggctcgacgcttccggtcgtcggcccggacttttgccggccgaaccgagctggtgtttcgccctgacgcgctgtctcgcccgcccagattgcggagggctgagcccgaccgcatctttcgcctccaccaacgaacgagccatgggccggcctcgagggacgagcgaagagagagaccgggggacaaggcagactgagcgagggcagcaaagggtcgcatcgaccgatcttgcctcgcccggcctgtcgtccacctttctcccctccctcgccgacgtcgtccatcaacgctctccttcagccaactgctctcagactcggtacgtcctgtcctttgccctcggccgggtctcgcaagcggcgaggcaatcaagccgcgcagcccgaggcccctttaaggctctgctccggataccttcggctgaccgtggtgcatgctcgcaaccttgggcctcagtctcccccgtccctccgccgacgatccctgcttcggtttaggctcgcccgccttccattcgtcgtcaacgaatccgtccccgaaacggctcatcgctctgaagcgagcttgaagtcgagagacgatgtcgtcaaccttcttccccaccgactacaccctcaccgcaagctcgtccatgctgctcgctccgccctcgcccatctcgcccgccgccgccaccgccgccggctgctcgtccaaggccgcctccgccagtctgcctcgcccatccttcttccggcgccagtcgtcgtcgttcacggccagggctgaggacagcccgctcacgccgctcgctagcgcccagcagccttcgtccggtgcgcccggcgactacttccctcactcggccaacgccgatgcagctctccgaccgtcctcgccttccgcctcgacgtcgaggatgtcgcgctctgtcgccacgccttacggcgaaaatcgcgaaccgaccagctcgaagacgacgtcgcctccgtcaaatgaccggcgccagcggcagccggcaccaccgccgataaagatcgcaccgccgcacaaatcgaccttcctgtttccgccgtcgccgaccgacgacgagtcatcgccgccgtcagactgccagcaacgaccctcggttgctctcgtgctgccaacgccgcatgactcgcactacaccatcccaccgtctccgacgccgcccgtctcgccaaaggtacatgactccgagcttcccgtcatcgctcgccctcggccgcagtcgtcgcagtcgtcgcttcgccaatcgcgcaaggcctcattcgtcgacggccagctctttggcgactactgcggcgaggcctgtgactcctcgccgctgccgtccccgtcgtatgagggcgcggtgcctcgacgcatgtcggttgccggatccggcactcggcgtcgatcttcaatgggccacggccaccctgggtcgaccggctacgcaagcttcacaagctgcatcaacggtgcgtcttctgctgacctcgggccgtagtcgccttcgatcagacgctgacctctagctgtgtgcctgccaacaggtgctctcgcccatgaaaagaaggcgaactcttacgaggactcggcccagggcgctagcccaaaggtgcgctgctgtagcccatctgtggccgacggatgcgcatgctgacgctctgcacttctccaggcccaccaccacttcaagcgctcgcacgagcttctccttctcgccctcgagcagcggccgggcgacctggaggcctccatctacaagtgcgtttctcggtctgttgtgcgactcggtgcagaagctgatgagcacctcgttccgcctatccagagctggtatcagtctcacgctggcgcgccgcttcttgcgaccatccgaggcgcttcgccagacccagacggccctctccgagcttcgtctcgctatgtcgctcgacaagacggctcactcgcggaacctccagatcgcgtgccaggtccagctcgcatccctgacgatgctgctcgccaagctttcggaggggctccatctgtcaatggtcccgcgcgccatttggcagggcgaggtcggcaaccttgctcgcgaggcggtccggctttgccaggaggtcgtccgcgccgaggatgccgtcatccacgacggctatgtctccgagacgcctggcttcgagggcagcgccgagtcctgggacgaggacgagtcggaggacctcgtcaacacacgcctcaccgagcgcgagcgccgcgggtcatcgatctgtcaccgccgggtgacagaagagaccctcgttgaggcctacctcgccctgggcgaggcagcccagcttgccgccgtcctcgcgccagacctcatcaactcggacaagtactttgacatcgccgagggcgcgctcgagggtgcttaccggacggcgcgcgacctccgctcgtcctcgctcgggccactgccgacgacacgcatgtcgacctcgacgatcggcccgccgccggtgacgagcgcctcgccgctgatgtaccaggtctaccttcggatcggcccggtcaagatggagcggctccggcacacgatcgaggtcggcgcccaattccctctcaaccaagccctcgctcaggctgtcctcgccgacatgggcaaagtcgctaccgacctcgccggcgtctctcgcggccagtgcgaggaagtcaaccagctcagtctactcggcgccgaggccttcgtgtcccgacgagacgccaagccgctcgccatccaggcgctcagccagctcggtgacgccgagttcctctttgcccacttgctcaagcgcgtctggcgccggcgtagctcaagcaaggccagctcgatccgccgggcgacgtcgaacgagtcgattccggcctctgccccggcagcggcgactcgccgcgcatccacggatgcgactgggccgaccggcttgctcacctcgcctggtgctgcacgccgggcaagtctggaggaccgtcggcggacgagcgcgaacggaggccgcgagacgctggtcgacaagcacacaattgtcgaggaggagtccgaggaggagacgaactctccgtcgggcacctcgtcatcgtcgctcaaagacggcagctcgacgaacgggggagactcggcaagctcgctccggttgcatctcacggtctcctctgcgcaccaacagcctcccgtctcgccgggcggcccgcgcccgttctggctgtcgcactcatccgaggcgacctcgccgcggatgtcgatggcgcagtaccgccggatctcggccgccagctcccaccgttcaaaccagtcggacgatgatgtcgccgttgccctgacgggcattcactcgtgctcgctcgccgaccgcaggcggtcttcgaccaagtcttaccagacatcgacctccagcgcggacgagatgtcgttccatccgccgatcggatcccagcagccgtccaaggaggatctcgccgagcaggcctgggtgctcctggcctcatgcatgcgaaactacaaggacgccttctcgcttctcaagacgtctcgaagcgcgacgagctcgatcgtcccggctcagagcgcgtcgtcgctggtccttcagcgggccaccctgctgctctccgtctcgatggccgcctacttccgggcctcactcgcgccccgaattgctgccgccaaggacagccggaccgccctcctcgtttcggccgaggtctactcgacctgggccgcgcgcgaggtcggctgggagtggctcgtcgaggaccagccgcgaccggctgattttacgacgccgttcgccggcgacacgacgctcatcgtctcgcgccacgccgttatcggccagaaggccatttttgccttgctccggaccgtctggcaccgcgccgtctctgccgggccgggcgagatcacaaaggaggagaagcgtgccgccaaggctcgcgtcgagaccatcgtcctccggctcaaaaacgaggccggctgcggcgcttacgacatcacgcgcttcaaggtcggcatcgaaaaattcgagggcgagtttgaccagggcgagtcgctcttctggggcggcttgtcgcggacgctcaagggcagcgcctgagacatagctcggcgctgccatccctcctcctcattccatcctaccaatctgttgtaccgacacttcgtccctccctacacgcacaagcttttccaccgcactgcacgcaaccgctcagctagatgatcgagcgatacaatatttcttctaaacgtcacctgggtcgtgagggtcatcaatcttcgcgagcagccgatcaggccgcatcctcctcggccttccgcttcttgttgcggattgcatcgccggcagcggtcgagttggagacgccgagcatcgtagcgtgctctgcgaggacacggccggtcagccaaggtagacaggcaagctagagaacacgaggaggcctcacggttgccagcgatgatgtcgtcgacgacgcggcggctgccgctggtgatgtagcggtgcgagataccgcgaaccatgatcggctgcttcaggagcgcattcagctcggccttggccttggcaatcttcgggtcaaacttggccgagccctggtgcttcgtactccgggttgggccctcgccgtcgtcaaggtcagactcgtccgtgtccatctgaatgtccatcgcctcagccgcctccttgagccagttcttctcgtggttcttctttttcattttgtggttggccgtctcgacctcgcgcgcgagggcaatccgccggcgcagctgctcaagcagggaccgctccgcaggcagttccgggatctcgtcggctagcgagaaaaagtaagattcgtcagcagacgatctgctggtgaaggccaaggaaacgggggacgtgctgcgaccgaacgacttcatcaacagcttctgaagcttcttctcttccggtccgcagatttgaagcgagaagccctcgcgcatggcacgcgccgtccggcccgagcggtggacgtagacgtcggccgtccgcggcagctggtagtggatgacgtggtcgacggagggaatgtcaagtcctcgagcggcgatgtcggtcgcgagcaggattgcatttggcgtgctcttgaagcggtcgaggttcttgagtcgctgcttctgctggaggtccgagtggagcgggaagacgggcagcttgaggagctcaagcagcggcatcgcacgccgaatgccgtcgatcgagccgaagaagacgatcgaccggcccgggtagcgaaggagaaagtagtagaggtagaggtccttctcggccgcgacgcagttgacctgagactcctgcagggtcgagacgacgccgccctcggtcgacaggtcgataacctcggggttttcgtcccggaagtcaagcttctcgaagaggtcgtctgcaagtggcgatcgggagagggtcaaactcgactgacggggtgcaggctgcgacaacagacaagaataaggcgcaccgagagtcgtcgtctgcttcttcttgcctccaacccgcgcgcccttgaagcgcttgagattcttctgcagttcgcgttccatcgtcgccgaaaagacaaacgtctggagatcggcccggccctcgaggccctcggccttctgctcgaacggtcggtcggcagcctccgagttggggttagccttgccggtgaagggcaggtcggcgacgaccgggaccttgggctcggcgacaggtgcgccctcgtctgacgacgcccggtgggtgagtgagacgatcgactcgagctcctggaagtggccggcttcaatcatccggtcggcctcgtcgataacgaggaacttgatctcacggatcgactgggcaatcgactcgtcctgtcaaaagtgtaccgatggtgagtcagtattgcccctttatagaacggttcggaagctcgctgcacgcacctcgccgatcaggtcccagagtcgaccaggcgtcgcgacgaggatgtcgacgccgcgcttgagaatccgtgtttgcttgtcgaccgacatgccgccgacgatgctaccgacgctcacgcgcggcggcggcttcgggcccgactgcttggcagccttcttcgccgccggcgcaggcgtcggcgccggcttggcctttttcttgaagcgcccattccggccgggctttgcccacgggttctcctcgagcttctccttcaggcccttctcggccgacgtctcggtctcgtcgtcactgctctgacctgccttcgccgcggtggactcgacctcctcctcggcagcagcctcggtgaagggcacatcgacgcacccctcagctgcctttgtaagatgctggctgacctggagcgcgagctctcgcgtcggggcaaggatgagcgcctggagcttgcgcttggccgggttcttgctcggcaccggcacggggaggcggaggatgtggtcgatgatcggcaggccgtaggcgagcgtctttcccgaaccagtctgggcgacaccgacgacgtcgcggccggcgagagccgaggggagggtcgctgcctggatcggcgatggtcggaagaaagacgaggcgaggagcgagtgcttgatcgcagggtgcagagccttgatcgagcgccaggctggcaggcgggcgtctgaggcgagcgaagtgacagtcagtcatggaacacgcaacgtagagcgcacgcgagggagccactcaccgtcaaagctgtcaggcaggggttcaagtgcgggcagcttggccgccggaccgtcctcctcggcgagcttgcgcttccgctcggctttctcgagtgcgagcttggccttccgctcgcgcgcctttttctctttggccgtcaggacgacgggctcttctgcagcatcggtcgtggccggctcagcgtcatctccctcagcgccagcggactcgtcgttgtcgctggcgtcggcagctggagctgccgcctcggcgtcgtcccgaatgccgccccaaggctcgtcctcggcttcggcagcggcttcatcgtccgagccactttcgtcggcggcgttcgtgtcgacctcgatctccgagtccgagtctagcgtctcgccgggcttgagcgggtcgagggtctggcacgcgcgcgagcgggcaagtgcgacagttggtgagaacagggtcagcacgagctcgtcggttgtcggccatcaacttccaggaggaggtacgcacacggaagacgaccttgcgaccgcctccagggagctcctcgtagacgacttcgacgttctcgacctcttcgaggccgaggatggcgccctcgcccgagagggcagctgattgcgcctgcgatggccttgggacgcgcttccagcggaggccggtttggttggtgagcgtaccaccggctgtggcaggtggcttgcgagtgccagatctaggtgccatgctcgagtgattgatggttcgaagatagacgagctcagtctcgctccgtcttctctgacaggcgcagcagcttggctcggtcgatttttggaagggcgggccgcgcaggcgacccggccagacagcagcagcgacagcccgctcgacagcttcgacctgcctctccggcaccaccgacctgacaagccctcttgatcctctacaagggtccacgcacggtcctctcccacagctcgacccgatcgacgagctcggactagcacacagcttccgccacctccttctcccgacgacggcggccgcctccgcccgaaccttcccttccgcctgaccatgtcacgcccggaacacatctctccgccggagattgtacgtcctgctactgtaatgctctttgtgcctgtcgactgaacatcactctggacgtctgcagtactacggcgatgtcgaggcgaccaagtacacccagaagtgagtggctcgcggcgaggagccacacctgcgcgcgcggctccgccctcgaggggtcgctgaccctcctggcccttcctcctcctgccagcactcggatccagaacattcagtcgtcgatggcctcgcgcgcgctcgagctgctcgccctgccggccgacgagccggccttcctgctcgacattggctgcggctcgggcctctcgggcgagatcctgacggacgagggctacgagtgggtcggcgtcgacgtcgcgccgtcgatgctcgaggtcgcgctcgagcgtgaggtcgagggcgacctcttcctccaggacattggccagggctttggcttccggccgggatcgttcgacggtgccatctcgtacgggccgacgctcgaccctttccctccgatgttctccggctgactacgtttggtccttgcccccccccccccaccagcgtctcggtccttcagtggctcttcaactcggatgcatcctcgcacaatcctatccagcggctcacgcgcttcttcacgacgctccactcggccctcaagcggccgtcgcgggcggtcctccagttctaccccgagtcggacgaccaggtccacctggcgctctcgacggcgatgcgcgcaggcttcaccggcggcctcgtcgtcgactaccccaattcgcgcaaggccaagaaattcttcctctgcctgatggtcggctcgacctcgggcggcatgagccagcgccaggccgaggcccagatgcccaaggctctcgagggcgacggcgacgagcacgtccggaacgagcgcaagcgtgagaagcagacgggcggccggcgcaagtcggtcaaggacgcgagcaaggagaagggtacgaaagagtgggtcctccgcaagaaggaactcgaccgcaagcgcggaagcgaaaagtcgtacgtcacactttctttctcaactcgcgctaccgctacatcggggtctaggctgatctccccttggcttggtccggcaggataccccgcgactcaaagtacaccgcccggagccgaaagatccgtttctgagcaatctcccctctcgggcccttctccccctttgcttgacctcgacttcgccttccctaatgaccatgacgctcgccttctcgtatttgcacgctgctggtagaagcggtatctcatcgcaggccgagaccagtcttgatgaaggcgaggggcagggcaaaggcagcgatgaagcctgcgggttgggcgcgagggggggatcagcgtcgaccttgcgagctctgaaaggggaccagcgacagaccaattccgccgtagaccatgaccttagtgaatactggcggacgcagcatgtcagcgaaaaacgctcacagcgcacgagaagaggcacgacaacgtactctgccggcctgacttgaggctctcgccatcgcccgcggtcaggctgcgggccgagccctcggccttcttgcgctcccactcgagccgctcggcctcgttgccccgcgtcggcggggtcgccaggccgccgtcgaggagcgggacgagctcggatcggacctccttcggcgccgtcggcgggaagaggttgatcggcgccggctcgtcaccgtcatcgccgttggcgacgcggtcgccgttgcttggagaaagctctgctagaggcgagctgggcagccgcggtgacgaggtgaagcgagggctcgactggccactggagacggccgatgctggggccgactcgccaagaatgtagagctttggcacaccgaggacgacggcgtagacgcgctcgagcacgatcttggcaacgatccgccagaggatgatgcagacgacgccggcgaggtacttccaggcctgaccaacgacctgccagacgcggtcgcccgaagcgacctggcctgagccaacgccagcagcggcaaagtcccagccgccagcgacctcgagccagcgtccaagcgagacgccgaggacgaccgaggtgaaagcgatcgcatctggaaagctgacgctcgggatgggcgggtcgggccggacgatgcagatgaccgtcatcagcagggcgaggatgagcggtcgggtgagggaaggcaaggcgaggaaggcctcccagtgggagcggacgagcgcgaagccgagcgaaagtccaaggccgcagacgctgccgaagaggcagtcgatggcggtgtgcatgccgcagtacacgcggccgaggcagacgatgacccagagagcaatcatgactgcgaggcagagggcgcatcagccaacgtgcgggcgaagaagcagcggcatcgggtattgacctggtcccccaacccagccaagaagcccgacctcgccggtcgctcggtttagcagcataaagtagaaggcggcgaaagtggttgtcgagccgcaatgtgacgacgggaagccgtactcgagcgcatggtactcgagcgagagccgcgtgacgggcggcgccagcggccgagggatctgcgcgatgtccttgacgaccgaggtgacgtagatgcccactgagatgtgtagcgaagggtcagccagttggacagctggcattcgcgcaagctcaactcacgtgccagggtcatgacgagcctggacaagggacggctcggcgtcagcttctacccataacctccacgcctttgtcagtcagactgactctctaccctctggcctgagttcatgtggcggggtacactggtcagcattgtccatgatgaagggaattgacagagacgcacccgtagccgaagaagaagaacgctggcaggaagcacatgaagaagccgacggcgccaagctggacggtcggataacacaggtacggcatcagcgacaccagaggagcaccatgaggccgacgcgagaacccacgcaccatgccagaccagaggaagatcgtgtcgagtagaggcgtcctgaatcgcgcctgcgcggcggcgatgcgctcagaagactgcggcagggcacgaagcaggtactccttggtcattgggacgagcgcccggctgtgaaggcgaaggttccggtcccgtagtcagctacgtgtccgaaccggtcgcaagaacaaggccgccgtacctctggccgacgtttgatgacgatcgcttccggcctcggatgggcttggcaggcatgagcaacgagctctgcgagtccgaccgtttaagctcggatgagcccgcaccgccgtccatctgctgcagtctggcccgatttctgaggtccggcatgctggtcgagagggctggtggccgggatccgcaagatggtcggcgggtcggcgagcggagggagggacgaggggaagccgctcaagcgcgcgggcgtgcacggcaggtacggtcgagggtcgtgccgtctctcctccaaaacccgaaagtccgttgtgtagttgttcaggcgatagcaaggccggtctgtactagcttctgacaagcgacagggagggtagagtcggaccgggtgatggagagaagatcaaaagtcgaagctcctgccgaaacgcgccgccgtcccgacccgaccagcgaccaagaccagcttccgtgaccctcccgtcctcccagcagcctctcctacacatctcaaggccatggcctcgacatcgcagacgccggccgcgatccctcccaaagacgattacgacagcgccgaagacccggacttcgcgctccctgcgcagcggccaatgcgcgcgtctcggccacgcacgacgcgccggccgtcgggctctggctcggccggcagctcgtcctcgagcagcgcaggctcgtcatcggacgaggacggcggggacaccgctggcggccgctcgcccaagcgggctaggaggtcggcgctcgagacgcgctcgggccacgtttacggcagcgaggcgggaccgtcggcggtcgcgccgctcgcaacgactggcggcggcgaggcagaccggccgcccatgacgctcgctcagctccagacgctcgaccgggagcggacgttggacatgctcgcagggggtactagtgctccttacaagggcaaaggacgagacgacggcgccgagcagatggtgacggtgcgggttaagcaccatttcgcgggcgaggacgtctggtccgtgcacccgtctctttgcctgtcggcgctttcgtcccgtcgctgacgccgatctcacgccggattcacagggttgagaagagcgtgctggcgtccagcaaggaggcccggatctggtgcgagccggaggctgcgagctcactcgacggcatcgacgaggatcggtcgctgctgcgccgagacgtcgacctcggcatcggaggcgagctgtcgccctctcccggagcagaaggagccaatcgagacggtctcgacgttctgcggacgctctcatctccccggcagtcagcgcaggtgacgccgccacctcccatcggcggcctcgactcgtcgtccgcagccgcgaccgcgctcgaccagccgtcaccgtccactcccgctccgccgccaccaggcgctcctgccgcacgactgccgccgcccaagaagcgcaagggtggcggtctggcagcggcggcaatcgcggccaagaacaaaggcaaaaagatgtcgacggtcgaaaaggtgcgacgcgtccctcgcccagacccaactcctgccctgaccgtccagattacccctctcccgccgcagtctgccatggattggaggagtcaccgtgcagaagagctcacggaggaagagcgcgatcagcttgcccgcaaccggcaggtcggaggcggcggtttcctcgaaaagcaggagttcctcagccgagtccaggagcgccgcggcatctgagcggctcctgtccatgcgccaactcttcggtctggcgtcccgtcaacttccggttcctcgtcattgtcatgccatcatgccagcctgcatttccttttgctgctctgccgtggggagcgcggcggcgcaacgcaagacgctgggcgtctgtccggtgggctagcccacgctgacacatactgactcatcgccagtcccaagacaagacatccgctctgctctctgtgaacggtcgtccctcgacctgcagcaggtgcaagggagagagtggcttgtgcggcgactgtcgaccgcgggctgtggtgcccgcacgctgccctgaaccaaacaaacctcgagtcgttcgcgggacttcggttctcatgcctcctcccgacgacggcctcacccgtttctctcgatggcgccctggctgacgagctcaggctctcggctatgtagctgagcaagcatggcgactcgctgacagactgatcagtcaggctccgggcagcggggggcgggagggagcgagagggcgaggggtacaagacgagcgggctgccagagcaggtccatcttccgctccatcacccctcaatcctcctctctcagctgctccccctcagtctcacttccacaagcatgtccatcaagaacgttgttctgctcggcgtgagtcgcgttcaccccgatcaagcagagcgggccgctaactttctccttccccttctggtcggcgacagggctccggcaacattggcgcacccatcctctcggccctgctcgcgtctgggctcttcaccgtgacgattctctcccgcgcctcctcgacgacgactttccccgccggtgttcgtgtcgtcaagacggattacaccccgtcatcgctcgtccaggccttccaagacgccgaggccgacgccgtggtctcaaccgtcacgacgacggccatcggcgaccagacgcggatcgtcgacgcagccgtcgaggcgggcgtcaagcgcttcatcaccagcgactttgggttggatattgccaacccggctgtgctcgaggcagtcccaatcctcggcggcaagacgcaagtgatcgaccaccttcggaagaaggagaaggacggtctgtcgtggacgtcgattatcaccggggcgttcatcgacttgtcagtccctcctctagctcacttcgcaccggtcaaacgcgcgctgaatcttgtcgcacccttgtttgtagcggcctctcgacgggcttcctcggcttcgacgtcgccggccgtaaggcaacgctcttcgacgaagccgacgtcccagcgacgctaacgacgtacgccaccattgccaagtcggtcgttggcgtcctcaaccggccgtcggagacggccaaccgcttcatccatatccagtctgtcgtcgctacgcaggctgagatcctggccgccctcgaaaaggcgaccggcgagagctttgccgtcacccgcaagcccgtaaccgacatgcgcgaatctggcttcgccgcgctcaaggccggcggcggacacgaagtcatgaacctcatcctctggggcctctacggcaagggcaacggtggcgagtatggcctccacaaaaacgacaacgcgctactcggcctcgagaagcagaccctcgacgaggtcatcaagcggctggtcgtctaaccgagtcgctgggcgcgtgtatgatgttcgttcttttctgcagccagcccgatccagtcagcctctacacctgctcaagaggccactcctcttatggatctttgcgcactgtaaggggggacgcagggctgggtctgctgcgcagcgctgcgtcggcggctgccggcccgctcgttgccgaccctcgcgaccttgacttgaatcatgaaccgccagcatccccatcacaagtccctcttcgaccaagcccaatgacagtcccgactctctttggaggcaacgcttcgacgtacacccggctcgttctcgtcacggcgcagcatttcggtctcgtcgagggccgcgactacgtctatcaggtgcggtcggccgagctcgtcgtcccctgttcaccccttcccgacagccttctaacctctgcctgcctcctcctctgccgccagaacatccctgtcaagactacgcgggacaagggtgcggctgaagctttaccctagaccagctaaatctcagtcctgacctgcgcaaccgactgccgcaggcttcgaggacacgcatcccttccgacagctgccgtacctcagcgacggcgagctcgtcctgtacgagtcgagagctattgctcgctatcttttggccaaaaaaggcctgtggccgaccgagcttgtccaggtacgctcgaacctgaagcgcctgtgctgcagccacgacgctgacgaccatcgcgctcggcctcgactgaaggcggcgctttgggatcaggcggcctcggtccacgcctccaactttgactcttcggcctacgcgatctgcttcgagcgggtcgtcaagaagtggagaggccttggtccacctgacgaggcggcgctcgcctggcataccgccaacctgaaccggaagctggcgggttacgagcgtctgctcggccggtcgaaggtcggtcgtccagcgcaaagtcctctttctcggccacccgaggctgacagcctccaaccacgtctatagtatcttaccggtgacgagatctcgccggccgacctctggcatctgccaaacggcaagtcgctcgtcgacctcggcgcacttccggctctgaccgatggctcgctcccaaacgtcgcgcgctggtggggcgagcttactgctcttccggcctggtccaaggtcctacagcaggtcagcaagctctaggagcgaagggcgtgtgcgatgtatgggcgttctcttctcatcgcacttgtcagaccccaggcgggggggtgcttcgcatccgctagtgccatcaatctagagcttgcctctactccaacgcaccgcctcctcaagcttctcaaagccctcgccggtgaagaagccctgaccgagcgggttgccctcgttccagtcggcgacgagccaggctgggccgttgcctgtctcgggatggccctcgtcccctggcagggcgagctggagctcggccggcatgcgggcgaacgcagttctgagcagcgaagcgagattggtgacggtatgatgggccaaagaggcgccgcggtgaccgggcagggtgcagagagcagcgatagacactgaggacgagaaagatgagccgtcagcggctttgcgttgtgccggaagcataaagaaccatcacgtacggtcctcgtagacgaggcaccaggagacgggcttgcgctcggacgtcgataggtcacggatgcacgacgtaaagtggaccgtcttgtcaaatgcctcgggcttgtaggacgacttgaacgtgtcgagggcctgatgcgcagtcgatgtgtgaatcgaagtgagggagcgttcgtcaaaagctgaccgttacagagccaatgacggccgacacacccaggggatctcatcccgggtcaggttgtcggcgacgaaacgcatgttgtcgagcaccttgcccggtgcgagagcggcatcgagcgtcttctggaccttgaagctgcggccgggggtgccctttggctcctcgacaaagtcgtcaaaggtcggctggaggccgtccggcacgccgccgaatgagaccgtcttaccggcgcgcgtcgtcttgaggtggctcatgatctgcttgaagaggccctcgcgcgaagccgagtcaggcgaagggtccgacagggccgagtgcaccttgatgagatcgtgcccgatctcgtgcgtcaagatgaccgcccaggcgtcgtcgtcgtcgtcgtcgtcggctttgaaccagaaggccttggtccccggctcgtagtaggcctcgacggcctcccaggtcgctgcaggcgggtcggctgctgaaggcgctggacagaagggcgcgaggaggacgtagagcaggttgagcgagaacgggatcgccggccggtgtgagagcttcgcgacgacggccggcagcgacgggagagcgacgagaggcatgactggtagtgatggttgacggagagagagaggatcagtacctctagtagtctctttcagccgaccggcctgtcccctcgtcgtcgtccggcgggctcgtcggcttgccccgggcgcttccctccgttgccgccttggcgcccgacgacgaccacgaccctcaaccaagcatcctgccagatcacacagcgcaccgccttgcctcctatgaccgccggcctccttctgccccgtctgctcacgcccgtcgcgcggtgcagcctccctcagggtctcgccgctcgcggcctccatctcgctgcccgacccgtcgcgtcatcggcagccgctggccgctcgacctcgccgctcctccagggcgtcgcctggcgagcctttaactccggctcgggcagcggccgctcgtcgtcgtcggccaggtggtcatccacctcgacctcgctcggcgtcgtcgccctctcggccctcggctgggctcatctccgcaccggcgccggcgcgagcggaccgatctactgcgagagcgcggccatgcctcctccgccgccgccagcgtcgagcgagccggcagcgtccatcatcaacccgtatgagctcggcttcggtgccgtctgcggcctgtgcgctggtgtctttgtcaagaagggcgccaagctgctcgcctttgcgctcggtggcgtcttcgtccttctccaggtacgttcgcgcccgatgacggcccaaccgggcgtcggatccggtcccgctctggtcgaagctgacgcacctcgcccgtctctctctcgcagtacatgaactcgctcaacctcgtcaaggtcaactggtccaagatcggcgcccgctacacgaacgcgaccgcccaggccgacggcctcggaggcacgaccgtcctgacggccaagcgcgccttcaactgggtcgtcgacttcctcacgaggtgcgaacgcgtcgccgacctgctgctcgtacgcccatgagcgcgctgacttgtcctcctccttcatctgctctgcagggacttccagcagcgggcgacctttgtcggcggctttgtcctcggcctgcgtctcggctaaacgtgtaccgactgactcgctcgcttcggcgctggctttggagagagattccccgcacgcagttgtgcttgcttgcagtcaatctggcatcgaatctggcatcgaagagggggttgcgggccaggctctgttctttcgcaggcagggacagagagggcgacgtggcctgtctatgcctattcgcaattcaaggggaaagagggcatctcagagttggcagagagtcgtgatgcgacggcttgtcagaccgaggtctcggcggccggctcctcaacgtcccactcttccggccagacacagccgttcccgtcgacgaaggtgacaccgacctcgcggagtgccctcgctgctcgcgtcaaggcagctgccatccgccgacgaggctggctgcagccaggagggagatcaccaaaggcggagaacccgagcttgtaaccttggacgacgttcttgagagcaggaaagcggcctgggtggtctctgatgacgttaccaagacgggcaacgtcggtcccaggctgccactcgttcgacgaccaattgagcatgaggtccatcaagccggctgggctgtgtcgagggcggcaggagtccgttgatggttgatgactaggcgccgcatcctcggaaatgtaggaagctagagcgaggaggtggccgcctcggggcgagggacgagggtgaggtcggtcagggtgtcgatgaagcggtgaagcgccgggacgacgagaccgaacttagttagcgaaaagccgcggagactgaggcgcgtgatcgtcgagggaagttcggcaaggcaggccgggtcgaacgagttggcccaggtctgatggaggccgaaggacagcgaggccgttaggtcgaagtaggttgagaggcgcacgttgggctgaccatcgacagagattgaccgaagggctgggatgagcagcggagccggtagctttgccgccagatgctgatcccaagggatgttcttgagactctggaggctgggcagccggccgccttggctgaggatgctgatcatatcgatgaagtcgcagtacagcaagtcgttgaggtcgacctcctcgacgagggccgcgagacgcggcttgttgcgcatgaggacacagagtttccgacgagcgtaagcggggagcatcgaccagtagaggcgctggccttcggcctagcaggttgaaagacactggggatggtcagccgtaggacgtcgtgcgaaggggccgtgcgtctcgcccttgcagctcgacgcacccgccagtcgcgcgagacgaggcacagctcagagagccgcccttgccgttgttctcctgcttgaggtcgatgctagcttcgcggaggatcgcgagctggagctcgaccggcagacggctgtggcgcttctgtatctggagcaaaggcagcgacaggtggacgggagcgggggggcttagcgacggcttgaccgacggacgatctgcagcgcaggtagactcacgacgcgggtggaccggcgcatgatgcgagtgcttttgagaggagtatccagacgctgtcgttatcggaggaggaaagttcggtcgctgtaaggagttcgagcgagcgagctgggaggcaggagcggtggtcaggagcgagagcggacgagctcgggccgcgcagtagaacaaggcacgtcgcgccgccgcctcttgcacgttcctcgcagagacaagcagtcaactcttgagattcacatacagggagaggcgacagcaacggcgcacacattagacaggagcaagcaataaaggagagttagaggagctttcaaggtgttggtattccgatgagacggacggcggctttcactcctgtcggcccttgcccttggcctttgccttctcggccttgcgcgccgcacgctgcatcgcccgcttggccatggcgtactcgccctcgtccgggtcctcgtccgagctgtcgggcccgccccaaacattgctggcctcgacgtctgaggcccggatgcgcgacgtccacgccgacgggccagagacgtcgaccgggaccgcgccgtcaaagtacttctcgcccggcggctggtagttgcccggcttaggctgccgaggcggactctcggtcgccggcgacggcgggacgccctcaatccggaccgacttgcgccgggtgacggttgcgccggtgtcggtgccgttggcattgacgaccgtgccgttggcggtcgacgacgacaggttcgagccgccgccgttgtgcgagccgggcggagaggcgagatggaggtcgggtgccaagccgttgagctgcttgccgagtgtcacgccctgagcgccgccgcggtcggtctcgttaccatcgtccgaggcgttgtcctcgagaccggtctcgtacacgctctcctcatcaccgccagtagcgggagcagggttcggcgcttgaaacgctgatggaggtggcggggcagtcgggacgctcatcactggcagctggccgagagccgagggcttcagctctcccatcgaccttggctggcggagggccgaccgcggaggaggtgaggccgttcggtgagcgggcgaatgtgcgaagttctcggccttgtccgacttgatcgctgacgcgaccgagagcgggcgcggcgtggccgccccgctaccagcagcgccgccgccggtggagaaggtcgacgagcgcttcatgccgctggacgacgtgtcagccgccggcggcgacagtgctgtagacgaggtcgactttgcaggccgaggcgtcgcgaaggaggaggcaggcacgatcgagctgccaggcgccgacggcagggtaaggctactagacggattgatggaccgcggggccgagatcgagacgagcgtcgggagaggagccggttcggcatcctttctggcggccgtcgcgccagtcggcttgccgttcgtgaccgacttcttgacgccaatggacggcacggccgaggatgaggacgaccgcttgacaccaggcggcgccgtcgtcaccttgacgccggtaccgagctccgactcggaccgcttggccttgagcgtcgcgctagacttggaggccttgagaccggtagcctggccgacgtctgatgaagcctgagcgcgggctttcggcttgctgcccgacgcagttgacggcgggaagtcgatcatcgactgccgcttattgtccttcttgtcggccgagccggccttgatggtcgaccgactgctcgacgagcgcttcatgccaggccggacggcaccgaccggctcgaccatccactcgccagtccggccgctggcctcgcccttcttgcctgcggtccgaccgacgttggtaacggcgacgagggcggcagagcgggccggcccgtcatcgtcggagctgctgtcgttgccgctggcgccgaggcgactcttcttgcggccccagctgagaccgccaccgccgccgccgccgctggccgaggtgccgacctcggatccgcctcctgaacggcggacattgcggtcggtgcgcgtcgaccagctgctcgagtagtgctgcatcgagtcgggcgagcctgaccggccggcgtcggagccgcgcttcagggcctctttgtcgcgcggcgcaaagagggccttgatggcgttcatgaagccacccttcttgcgctgcttgcctccgccgccagagccgtcgctgcgcatactggtcgagacgctgctagcgttggacgtccggcgctcgagcggcccacgccggctgccggtgtttgaccggccgacatccgactgggcgcgccgccggctgctggcgcccttaagcgtgccggcatctgaggagtccgagtcgtctcctccgtaggctgccctgggctgcgcggcagtattggccttggcggccgtacgcgagttccaggtcgaggagggcgcgggcggcgggtttcgcggtgcatggtgggctctcaacggtgaggttggactggtcgggccgttgttgcgcgtgttctcgacgaccttgagcattggtcgccgacggccaccgcctccatcgctcgagctcccgtccgattcgatgacactggcgagagagccggccggctcgtttgcatactgctgctggtgcaggccgagggccgagggcggcgcgccatcgctgttgattgagtcatcgtcgcggccgatctgcgaggcagactgcgacggcgccagcgacggcgtcgtcgactcgatcgagccctggtagttcttcttgatgtgcgaagggatgtggtgctcgtagggcgctgcagagagggcgagcaatgtcttgtcagcttcgcattcaggcgacagagttgtcggtcaagactcaccgccctcggacaggtaggtcatgatctcgactccagcacgcttggcgccctccgcccagctccggccagcagcctccattgcctcgagccgcagctcgacgcactctttgagcacgcgccggcgaacctcctcgacgcgcacctcctccttccggagcgcgtcctcacagccagagagctcgagctgggcctcctcaagacgacctgcgcggtcaaatgacccaaccgaggacgacgaagggagcgaggagccaccccggctgggggcagctgcagcagccgaggcgcggagctcagacttggacggcttcttcttggtctgcttgatcatacgctgtacgctaatggtcatgagcaagacgagaacgtcagcaggccctcttcctgacagcgatcggcaggtgagcgaagccagccagacgtacaggatgtcgcggtcgcgcgtgatgttggccaagttctcctcggcatcgcggatctccttgagaccgagccgggtttgactgagggtgttggcgtaggcctgaatacgatggagaaggtcagccgtcaactctagggatgcggtgtcctctggcgggaccgacctgcatcctcgggtgggcctcctcctcgaggacgccgacaacgccgccgatggcgaggctcagcggctggtcccggcctgagccagcatacgctgcgagcgcggcattggccgagtggacgcgcgagagactaagcaggagcgcatcaacgtgggccttctctgacctaagggtttcgggaggaggtcagggcacagacgttagcccttggtcgactttgcagagccatcgctcgcctacatccacggcatcagctcgctggatcatccagctggcgcgtgcagaacaccaaggcagaataaaggcaacgcactcaagaaggttgatgagcaggcgctgtgtcggcgacgggtgcttcctcgtcacgaggatgtccattttgggctgcgagggcgatggaaggaggagggttgcgcggggttggccgaagagtcggaggcgaggggcagtggcgagcggctagagcgacgaggacgggcttccctagcaggcagacccggtgcgaagtcggataagaggagagagagaaggaaggagggatggcgctgatgggtgtctggcgggcggatgcagccctctggtcggtcgtcttctcgcctccccgcgcgcgaggtctctctcagcaaatggtggcgcgggtcggtgacgcggccggccggccggccaacgatctggacccgtaaactgagtctcgcgtccttccccgccgtcgcgccgtcctcggcgacccatgccggcgggcgggaggggtcgtgaaagatcggggccatgatagatcgtgtcagggcaacagagggaaggaaaagcacaagggcccagaggaagactgcagcgaccggcagacgtcggtcaaagcggcagctgtcggcggccgcccgagctggcccgaggttgcgggtcgagaatccgcccttgcgatccctcatggcgcgggtgccgacttggtcgtcaaccagagccagagggcgaacagcaggaggacatgcgctccaacgcctgcgagctcggtccgagacgacccccggctggcgagtgcgagcgcgagaacggcaagctgcgcgccgactgtcggcccgccggtgcgggcgaggagagcgtgcagcgagaggaacttgagcaggacgaatgaggcgtgtgcgaggtcgatatctgccggcgagaacgagtcgagcgatcggctggtcgacggtggtgcgaggaggatgcgattcgacggcagaaggcggagcggacccttctccaggaacgtcgaggactgtagagcaagctggtcagctggactcactactttgaagaggcgcgagacggacacgtgtcggagtcgagattcgcgtctccgccgctggcatcgtcagagcaacgaggtcggagaatgacccgctcggtgtcggctcgacggtggtcaccgtgacctcgtcctcgacgacgtcgtcctccatgcatgagggtctcggcacgtagggcgcaagcgagtggtcggagtcggtctgttcgtaaacccgagcggtcgcttgggtcgccggcatcgtgttcgtctcgaacgggtagtgctgagggctctcgtcctgcaagaagcgttgaggagagtcagcaccgccgttggctgaagcggcaagatgagcctgacgcacgcggatgccaaacttgaggatgtcgtcaatcaggcggcagccgatgcgcttacgcatgtcaaggttcaggagactgctgaggatccagaggtagaagcgtgggagaccgcgccggtcgagggcctcgaagagagctggagtcggtaggaagcccgggtagacgaggatctcggccgcgaggactggcgggcgaacagtggcggatgagtcgtcaaggtcagtgatcgcgacgacgactatggatattgtgcagcgaaggcaccctcgaggtcctcgacctgcgagtacgggaggcggtagaaaagtagcttgtggaggatgaggcctgattcatggcgaagcgtcagccgacgtggtaaagatcgcgtagaagctggggacacggaccgagcgcccagtgatcgctctctttgccgatgtcgccccggccggcattgagctcaacgttctccggcgcacagtactcgagcgtgcccgtgttgcccgtacggcgaccgctctcgccggcttgcgggaagtagatgactcggcgagtcgtaccaaagtcgctgataagggggcgagggatcaagtcgccgtccgactcgtcgatgtagaggagcacgttcgagcacttaaggtcgaggtgaaggagatcatggttgtgctgatacggagaggtaggcgacggtcagtggttcgactctgagcaagctgcaggcggtcagacaagcgagatgcacgaggtagcccagcccgcgaacgacgcctccaaagatgccgtcaatctcggccttgcccatgagacgaacacctcgccgctcgcctcgttcgaccggtttctggctccctcgccgtgcgcggaaggcggccttgacgtcctcgacaccctggccgctgcgcatgacgtcgggtccgccggctccagccgggccgccggaggatcctgaccgctcggcgaggtagtcctcgagcgagccgagcggggcgtactgcatcagaatgtgcagcgagtcgatgtacgggccgaagctgatcggaaggcgagagatgtgagtcagttgtcgagtctcgtgacggcttcggtttgggcgcacctggagaaccgcgctttctcgatccaagcgtggtgatacgtgactgaaggcagggccgatgagcatgctgtccttgtgaagtcgttcagcgtgagagcggcggagacaaggacgcactgatgttctcgtgccgcagacccttaaggacctcgacctcgcgtaggacgctccgacggtacgccttgtccttgccaacagcgaccttcttgacggcatagaggcccaatggctgatcgtcgaggacgtgctcgcaaaggaagaccgagccgtatgcgcccatgcctggcacggccagcgcaatgaaggaaagacacgagtcgcgcgtcagctagacatttaatagaaagaaggccaggcgcctcaccgaggcgctgccgctcgacaaagaagcggccgtaatagccgtcggctccgctgttcgtctctgagttcgaggatgacgaggacgcccgtgcactcgccatgctcggccggctacgcagctgctgcagctgctcgtcctcatcctcctcatcgtcgctcgctggcgcagaaggtgagaagaagcgcttgatgcgcgaggtcgacgacgatggggacacccggcccgagggcatcggcgtctttgcccgggaaagcaggtcgaaatagcgggcgtgctgcgcctgctgatcctcgtcggccgggaagaaggcctgctggaggtttgaaaagcgagcaggcgagatcagcctggaagtccgcgtatgcattcatctcgaaagctgcgagctcaaccggagcagagcaacaagacggcaggtgaagcgcaagacgcacaggggttggctcgtggtacggccgacggcaggtcgggcaccggccgccgtctccatcgaccggatctggcttgtcctcgtccagttcgaaagagatcgaagctcttccgcctcggccttggagcgaggtctcgcctcgctcgagcgcgttcggcaggctagcgttgtcgtctggctcgggtggttgccgcgggggtcggctctgaggcaggacggtgagcgagtgctcggttgggttgtagaggacgagcgcctgcggggtcgtgaggatggtctgccactgcgtactcgacgctgagctccgagggatgagcgacatttgaggacaagtcgtgttggcaggaggagaggtgaggagggcgagatggtcgtccgggagcaaggtcgtcgggagctcgctcccctcccgacccgacgccggcaggcggccatgagatcgcacagtcgctaccggccgctgccacaaagctccagccttgcagtttgcgctcgccggcatgcaagtacggccgctcatccgactttaggcctgtcatgcctgaacttgagagggtcaagccattggcgacggccgctgggaagcggcgagcgattcggcgcgcagcagcgctcgtcttctctcgcagagagcgacggcggatgtccctcgcttgcgagcgacggcatgcagtgatcggacgagaagcacattttcatgcggcagcggcctcctcgacgggcgcctgctcgccagtctcctcctgggcgaccgcctcggctgcctcggcgccgtcgatggctgcctgctcctcctggtcgacggcagcgacggtggcctccggcagacccgcatgggtgcccggcagcaccgtcttgggcggctcgcctagaatgttcttgccgaagacgcggttcgagagggcactggagaggagcaggaagagatccagacttcaagtcagcgagcagcgcctctgtcgttggagcatgctgggcgacacacagcttgtccgtcttcgacagcatcagcgacatcgacgccgccgccttccatatcggcacgttgagcgcctgcttgaggctaaagaagagcgttcaaggcgtcagctttcgtctgttggcccaggtcatgcctcctctcgcacgaacgcacctgccgcccttgacctctcccggcaggacagagcagaccatgctgccgaccggcgccgccttgaacacgctcttgacgggctcctcgaaccgatcaatgagcgggtagtagatctcgagcatcgtcttgagctcattcagcgaaatcttggtaacgtcctcctcgcggatgaattggaggaggacctggagaccctcggcgcaggcccgccaggagcagtcaaccgcatcctcgccgccgcggttcgactgccgggcaaagagcttgacaccggcagagacaagccggagccgggtgtactcgttgttgaggatgatgctctgcagaaggtgccggcgctcgtgtcagcgccaaaagttgacagaccacagcccttgaacctcgcgcaccttgatgagctcgctcgagtagtagaccgagcggacggcgtcaccgttcgagttgcgaacgtaaaggcagtcttgcgagaagtcgcgcagcttgaagaagcgcacggcatcctggacgtcggccgcgttgccgtcgaggaagaagtagggctgctccttgaacgagccgtcgggcttgcccgtcagtcggacgagctccgtgctgtccttgccgccggcgttaccaccagctccgccactgcgagccttcttagccggcggcttgctcgcatccgttgccgtctcgagcgacggcgaggcgccacgcttaacaccagcctcgacagcagcagccttgtccctgggatgcgagagagtacgccgtcaatcagattgaacaggccaatgacacgttttgattggagcttactcgagaggctcctcggcaggcgcgccggtcgaaccaggctcagtcttggcgatcgagtcgacgaaggggacgatgctgaggcacaggatagccgagagtcagcgtttcgttatcaggggcctgagaaggtcgtggacttggcgcacggctgctcctcaatcggctcggcctcgtgcgggtccatcgcgatgtcctcggcagcggcggtcgaagcgccagtagcctcccctgacttgacatcctcgagcggcgcgtcggccttcttctcgagcacggtgacaaagaagccaccggtgtcctggtcgtgcgggtagaaacgcatgctgtcggtcgaaatacaagcctgatcagccctgagccgtcgactgagggaaacggaggaatcacgcaccacttctcaatgccgagctccttctcatttcctgccggccagagcgacgaggtgatcttgtccttgatctcgtccttgacctcggtcgaggcgaggaagtcggcgtacgtgtcgcagaccttcgtgtctttgtcgaaggccgccttccacgacgtcatgcccggccggcggttcaggatcggcaggtcggccgcgacgtcgataatctcaaacgcccggttcttgttgagcgcggctgagatgacggcctcgttctcgatcgggttgaacgagcaggtcgagtagacgagccggccgcccggcttgaggagctccatcgcccggaggaggattcgcagctggaggttgtgaaggccgttgccgtcgacgggcgaccaccggcgccagatgaccgtgttcttccgcattgtgccgtcgcccgagcacctggagggggtcagacctggtcagcacgctagacatcgctactcagtccgattaaaatgcaggacgcacgggacgtcacaaaggatccggtcaaacatgagcgtcttcatgccgtacttcgcctggccgtccgggccaagcgagatctttgggaactgaagagagcgagcgcaggcagctgtcagccacttgaggcaggcgactggattgagagcgacgcacgcgcgaggcatcaaggttggtcacgagcacattggcactcggtagccggttgctctggtggacaagcaggtgcgaccgcttgagatcggcgtcgttcgcaaggacgagtccacgaggcttgccgctggcgtcatcggccgacgacgagccggcgtggagggcctcgagcagctgggccgtcttggagccgggggcggcgcagaggtcgaggacgtggtggtgcggctgcacgtccatgaacaggggcgggatcatcgagacggcctcctggcgcgagagatttccctgagagcaagtgatgagagcagcgtgagcggcagtcgggcagacgactgcgcagggaatgagaatgagccggccagacgcacgacgtccgtctcgtacacgaggaactgctgcagcttgcggtactcggggctcttgcgaatgaccgttttgccgacgttgatctgccagccgaggccgtccgggtaccaagggagctgggtcggcgccggctggacgacgccatcgatcgtcacgttgttgacggccgagacgaagtgagtcttgaacaggtcattgtggtcctgggcggcactgcgaatgagtcgtcggccaatgcagaattgtcagctgtcatctcgaggattccctcgcataaagagtagagaggacgcacgccttggagccggtgaagcggaacgtcgtcggcagcggcgtacggagcgactttataaagcaagcccactcggcctcaggcagcatgccctgggcctagcgagccgagcaagcgagcgacacctgcacgtcagttcgagctctgaataagctgaggcgaccgagcgagcgacgtacctggtagtagcgctcgaagccctcgcactccataacgacgtcttcgtagccgacctggcccttgaggatgccggacgggacgccagagccggggatgccggcaccctcagccttctcggccttggggttcgccgccttggacgacttcttgccctgagtgagagcggtcgagagggagaatcagcaacgacgtcctgtagggcttcggccagctcggagaggaggaggacgagagggctgcgggcaggccgggctgctagcggctcctgtaggtcaagcggctcggcgaccggagctcgcagcgaccagaaggcctgccagcggcgaggcacaagctgaactggacgaactttgcgagccatcgttcagatctgagggtggatggaaggtgggacgcgggtgggtgttgacggtgctcctcctccttctgcgcggcccgctctcccaaattcccagccatcggagacgagcccgagcatgcgttggacaacctcgcttcgaccatcgcaagcagatcaatcgtagcagaaacctgtgtccacgcgcacgactcatcatgaatagagcgcgaggcggccgcccagcctgaccgtcgcccaacgagcgacggtcggacgtcgagccgacgcagagagagacgcggctgcccctcggctatctgttcgggtgtcctcccgccggcatcggcccctcagccatagagggtgtagcgggttggaaggcacgcccgaacgtgcgcgcacaaggagaggctccagccatcctgtgagccaaggatgcaacggttcctcgacgacttcctcgccggccgcagcagggagaaggtcggcgagtctacagcaggagctcccgggcaggattgaggaaccctttgcctcacgttcacgcgctcgggtcggagccggcaagcgggaggtcgtcttggcgggtcagattatcctctgggtcgtcattggggtcgaccgcgtcggggttcatggccagaaggaggagcgaggccgtcagccgttccccaacccgggggccggccgttttcagaaggcccagagcggagcccaaacgtcgcagccaatcccgtcttccgacccccgtcgtcctcctcctcctggccttctccgaactcccatacccttaacagtctcaagccatgtcgctcctccgctcgctcctcaaggctgcgcctcagcaggcctcgcgccgtgcctattcggccgcctcgcccttcccccaggtcaacaagggcttcgtccccatgtttgccgaggcgcccgtcaaggagtcggacatcgtcgccaagtacctccgcgacaccgcctggtcgcaggagcgtgccgcgctcgagggccacgcccctggtgcgtctgtcctgctcgtcgctcggctaggttcaggaggaggaggctgggtggcgtgacggagagagcatcgagggggtcgatcggccgtaccggggccgagcttgagacgctgacgaccgggtcgcccttccttctctttgcctaccctgtagaggctaccgctctctggcgccgcgtcacgtacgtctctctctctctggctatcgctcgcaaggcgccgcaaaggtgtcgtgaatcgcagctgtcgccgcaagagcctgacgttggccctcgctcctcgccttgaccgctcgcctccagcctcttcgtcgccctcccgaccgtcctcatcacctccatctttgtctacaagaaggaggccgaacacaacgcccacatcgaccacgagatgtccgtcgactcagatctgtcctggatgagggggatgtttgctgacgagcgcctttgtcgggtccgagcagcgagcacaacggcggcaaggcgcccaagcgcgtcatcttcgactacatgaaccgccggcttaaggtaggtcattgagctgtcccttagactgctgctacatgctcaaggatggtgctgacacgtctccctcgtgctctagcccctcccctggtacgttgtcagccatctctacccttggcctggggtcgccttccgagaccttccgaccggaaccgcttgcctcagcggctcgctctactctcactgtcgtcgttcgatcactgacgtctgcaacctgcttctttgcggtccaacagggcgggaaaccaggtccgttgcctcctacggtagcgatgtgcgtcggtgctgaactagaggcttccccatctcctttttctcctgtcgtcccgttcagtcgctcttcttcagcccccgctacaacatccaggctgtgcgttccttcttcgccatcctgtgcgcctctgcgctacctcgaggctacgcggctgacatctcccctgctccccgcgaccgctcacagccgctggagttcggaggcgagtacgaggaggacgaggagtaaagcgctggcacgtctcgagggtgattgcggcctctcttcaagggagaagggcccatcacgcgttctctttctgttgggccggtcggcgaacgaggttcgctcgaggagcgggtgcgggtcgggccggagccggagcggcttgcacaggtggggtggggaggttggaatcgaacgaagatctttccaaagtgactgggccgggctagcccgatgagagaggaaggagtggcgtcggaccggccgctcgacccacagccggcagccggcagcccgtcggagggacggcgagagaggcctcttgccaggcgtacgacccctcaattgacaggagtgaaagccccatcgacagctagatttgcgcagaggccagggcattcctcctaacaatcaggacgcggcgagtggtacgagcacctggtggccgtcgacggtcctggccgctcctccttgtgccgcgccgccgagccggtgacgatggccgcagcggcagggcggcatcgcttggcccttgcctttcgaccttgcccagcagacgaccacctttccagacctcgcttctctacgtacgtacgcgctgtctcctaaggacgctagatctgaacagagcgagagggctagctggcctcaggcgcaggctgcgctctcccagctcgagctcgagggacgctgccggctgacgcttcgtccgccttgctcgacgacaggccacccttccatcaccacctctcagagctccttccgcagatccatcctaccccaacctcctctcaagcactcgcagaagcagcaacgatggcgtctggcctgcaaaagatgaagctcggtcgcaagtacccccaggtgccgccgcctgagatggacgagattatcagcctcttcgcgtgcgttccgctggccagctttgagccgctcgccgtcaagctagcgaggagctctccccgagaggccatcgtcgagggcgcccactgacccggtttctctcgcctttgtccggacggatcctagcaagattgatgtcgaagagaagggcagcctcgacaaggcgaccgtctacgccggcctcgaggacgccggcgagggcaactacgacaccgtacgtcgctcgccccttgcccgtacgacgtgacatcaaggtgccagagctgaccagaggcccaacgatgcagattcgggagacgctaaagacagttaatgtcgactcgtcgggccgggtcgagctcgaggactgggtcgcggtgcgtttctcttgctctccgctcggcgtcgcttgccaactggcatcacgctgatgctcggctacttgccacttcagctcgtgacctcgctccggagctccaagtcgactggaccgctgctcgaggccaagggcggcaagattgccgtcaagggcacgggcacgtcaaacgcctcgcacacgatgagcgaggacgagcgcagcgccttcaccgcccacatcaacggcgtacgtcttgtccttcttgggcgcttgcggctggagaagattgatactgagacgagtgccaatcgcgcgcacgcatccaggtcctcgccggcgacaaggatgtcggccacatgctgccgatcccggagcacacgatgcagctgtttgacgagtgccggggtgcgtttccattgcctgcgcggctctccgagagactcaagctcacccgctcccttctcgctgtcagacggcctcatcctctgcaagctcatcaacgactcggtgcccgacacgatcgacgagcgtgtcctcaacaaggcgtcgattagcaagggcaagcccaaggcgctcaacgccttccagattactgagaacaacaacattgtcatctcgtcggccaagggcatcggctgctcggtcgtcaacatcggaccctccgacatctctgacggcaccgagcacctgatcctcggcctcatctggcagattatccggcgcggtctcctctccaagattgacatcaagcaccacccagagctctaccgcctgctcgacgacggcgagacgctcgaggagttccttcggctcccgcccgaccaaatcctcctccgctggttcaactttcacctcaaggccgccaactggccgcggaggtgagtccacttgatcagctgagcgatagctttcgcgctgaccccatccatccaacgtttgcctagggtcaacaacttttcgaaggacgtctcggacgccgagaactacacggttctgctcaaccagctcaagcccgatgcttgctcgcgggcgccgctccagacgtcggacctccaccagcgggccgagcaggtcctgcagaatgccgaccgaatcggctgccgcaagtacctctcgccctcgtcgctcgtcgccggcaaccccaagctcaacctggcgtttgtcgcccacctgttcaacacccacccggggctcgagcctctcgaggagtcggaggcgccgcccgaggtcgaggactttgatgccgagggcgaacgcgaggcccgcgtctttacgctctggctcaactcgctcgacgtcgagccgggcgtctacaacctgtttgaggacctcaaggacggcagcgtcatcctccaggcttttgacaaggttgtcccgggctcggtcgtctggcggcgggtgaccaagcccaaggagggccaggagatgtcgcgcttcaaggctgtcgaaaacaccaactacgcggtcgacctcgcctcggccaacggcatgcgcatggtcggcatccagggcgccgacattgtcgacggcacgaagactctcgtcctcggcctcgtctggcagctgatgcggctcaacattgacaagacgctcgcctcactttcgcgcaacggaaagggcgtgaccgacaccgagattgtccgctgggcaaacgacacggtcaagggcgccggcaagtcgacggcgatgcgctcgctccgggacccgtcccttcgcaacggccacttcttcctcgacctcgtcgacacgctccggccggggatcgttgaccagacgctcgtcgaacagggcaacagcgaggacgagtgcatcctcaacggtacgttgcgctgcttattgcctcttgcccgcttaaaggccgcgacagccggtcggaagtatggcccgcatgcggcagcgtcggcggccgactcaccgatcggtagcgttgagatcggttgggcgagagagacgacagccgtcggcgccaaggatggctcggtggctgcccgcctgggtgggggaaagtctaaatctgatcgctaactctgaacccccttttctccttttccatcggccgccatctcaacatcccccttttccgtcgcgtcgcaaacctgcagcccgcttggccatctctgtcctccgcaagctcggcggtgtcgtctttgtcgtcgctgaggaccttgtcgaggacaagcccaagctccggctcacctttggtgcgcctttttctcctgcgctcgaagggcttcttcgccagccttcgctgaccttcgccacacttttcgattcgccttcagtcgcggccatcatggcgcactcgacggtcgcgcactgaggcgagcgtgccactgactgcgcgcgggcgggcgagcgggcgcagaagcgcaggcgagggccggaacgatcagcggtgccggacgagcgagggaggcgtcgggcttctcggatgcagtgaaggggaggggcgttcttcgaggagagggaatcgtgcgttcaagcttccctttgttcgcgttcgggaccgtttggtgggacggacggacgcgtgctcgtgtcgtcagtcgctttgcacagacgctttgcacagacgcgcgtcgttgctccctcctactgttcgctcctccttgcccacgcgtccggccacttgttttcccttctcgcgcccgaagcggccgtccctcctttactcccctttcttctctcgctcccgctctcgtgaacaatctgtagcatgtcgtgactagcctcggtcgccgcgtggttctaggccaccgggcgggctcagcaagcctcgacaagagggaggaagagtcgaaagcaggacgccgcgcggagttgttgttaggccgggccaagaaattaatcgccgcggcaggtaagacgggtacggccgggcctagattttagctgatgctggccgggctgctgcgcgtgagacagctgtcgttcttcccttctcgcctctccctttgagcatctcgtcttccgtcaccctccccgtcccgattcacgcacaagagaccccacgcgtcgccacacggctcacacacactcgctcagcgccctccgagacggccatcagccgcctcttcgcctcttttctccgaacggccatcctccctccctccctgatcagcccacctccgctccggtcgtctctctctctccctctctctctgctcttacccgtccgccgccgtcaaagccgtcggtcctaccctctctaagacgataccgtctttcgtcaaggcccgtcgtcgtcgtcgctgccgcctccgtcctcaagaaagcccctcttcgagctcgagctgcccttcgtccagccagtctcgccctccctttcatccccgacgtcttctggaaaccttgcccacacctccgccagccatgccttctgtcgcaggtaagaagaagggcttcttctcccgtaaggccgctccggttgaggcggccgctccagccagtacgtcctcccctcactcattcgcttcctggcgcaacgtcgacgcagtctcgcaactgcacgcggttcgcagccgagacccgatcaaccgcccgatggatcttcgtttgccagccccctcttcccatctagacgctgaagtcgtctctctctccctcgcagagtccaagacaccgcttgccgttccctccggtgccggcgccacccgcgcgtcgccgacgccctcagcgaaggcgtccttcgcgtcgcccacgcccgtcgcagcaacggccggcacggcctggcctgtttcgcccgaggcgcccaagccgatggagtcgcacggcctgatccctcagtcgaaccgcgaccggtcgagcctgcgcgggctcgactgggaccagctcggtccggcgatggcggccggtcagcggcactcgccgccgacgaccggcaagccggcgacgtcgccgaacgagccggccgccccccagccgacgcggacaaagtcgccaggcccgacggccgagctcggcgccgtcatccgcgaggagccgtcagccccgtcggccgctgcaggcggcgagtcgaccggcggcttcaagagcctctttggccggggcggcaagggcgccagcaagcatggcaagaaccagagcgtctcaaactcgattgccagcgcggcgagcagcgcgacgacggcagcgaccctcccgaggagcgcgtccatgacgagcggcaccggctcagatggtgcgtccccgttgagcttcctttttcgtctgctcttctgtcttccccaaccttgctgtcgtgcccggcaccggaagggagcggcgacgccagaggtggcgcgcgcagtcgcgtgcggcgggcgggcgtgttgcgcgcgtgttgcgcgcgaaggggaaaggaacacgcatcactgacagtggctcttccaccctttccttctccgccttttctcctctcttccgcccgacctcaccctcgcttgctttaaacagccgtcaggaactctgccgccggcgtcggtgccgccaagggtcacgcctcgaagccttcggcctcgtcctacttttcgcagcaaagctcggccccgcgctcgagccagtcgtctgtcgccgcctcgcagccggcgccgcccgtcatccggcgaatggagtcggacgcccggtccatctcgtcggtcaacacgactttctcggccgtctcgtcgctccacccgggcgcgtcagtcccgccgccgccgctgccgtccaacagcgcgagctttgcgccggccaacggccagatccggccgaaccagccgccgccggtccgcgtccgcgtctttatcgaccacccgacgaccgagcccctctacgtgacggtcaacccggggaccgagacgctccggtcgttcaagcacaagattctcaagacggacaacgagcgcttcatccagttccgccatgcccggcgcccgccggtcgagacccggtgggacatctcggactcgccctttgatgacccaaaggcgaccggctttgacctcgacgagcgcatccagctcttccgcgtctcggtcaactggctcgtcgtcagcaagacgaagcgggcattcgagaagacgcggacttttacctcgatcctctcgtgctgcccgtcgacgccgatcctcgcggccgaccccaactcgctgctcgacctcggcgcgctcttcccgccttcggccgaggcggccgaggcccggctcaaaggcctaatcgagattgtcgtacgcatcacgccgaggcagagcatcccgctccttgtctcgtactcggacatgcccgaccacccggtcgtcgtcgacgtcgagcgcggcatgaccgtccgcgacctcaaggagacgattggcgaggctcggacgctcatcgtccggcccgtcggcggcgtccagaatgggctcgagaacagcgacttttacctgttcaaggtgcgttctgctcttctctccagcctggcagctcgggctcatcgctcacgccactactctcgccttggctttcgcagtgcgcccagccgtgccacaagggcccgctgccgttcgatattgacgtctttgagggcctctcgcccgagacgctctttgacgacgagtcggcaccgttcgaggaccacatgttcatcgagcgcaccggctgggatgcggccgacatgtcgctcgagcgggtcgagctcgtcgctttcctgaccgacgacatggaagacgacttccgcgaaagcctgcggagtacgtacttgaccgcttgtccttcgcgcaatctctccggcgctgaccatcacgcctgttacttcctccctgcagtgtacactaagcagggtgcgccctcgatccgctcggccgccaacagcggcgcttcgaaacggccgcagacgcagtcctcgtcgtctatcgagcgctcgcccggcatgtcgcccgcaaaggcttacgcctcgcagcagcgtccctcacctcagcgtccgccggcgagtcagctgccgccgcagacgcgcaaggaggaccgccaccggtcgatgcctcttcagccgcgggccagcaacggctccagcccacggacgcaggccgtgccggcaccgcctcaagcttcgcctactcctcgcaacaagcacctctcgcagcaggcgccgcgcgactatcgcgactaccagcctggagctcagcctcaacaggttgcacaaccgacacgatcaaactcgaacatctcagcctcgagctcagtccctaacctcgccggtgtcgggtccgctgctcggctgggcggccgcaacatccccaagatcaacggcacctactcgcccgacaacatggtttcgccctcgtcgtcgcccgttcttggcggcggacggagtgattcggcccggagctcgccgcggtcctcgacggcgcagaactttggcggctcgaaccacggcaagacccctcctcgctcgcccttgatgggtggtgacgacgacgcctcggcgtacgatgaccagtcgaccggcccgtcgccggccatccctttctcggcaccggctgccgcggagaaccccgcttggtcgccgacactcctcaacggcctctcgcagcacaagcgtagcaccgacctcgatccgctcgagctctcgaacgtcaatgagggcctcggcctcgacgacatcctccacggctacaacacgcgcagtagcgtcgattcgctcggcctaacgatgagccgcaagacgacggtcgacggcgtgtccgaggctcccatcatcgaagacctcggcgagacggtcgaccgcaagctcagcaacaactctgcctacggcgtcgtcaacaacgaatatctcgccgctccagagtcgctgcaggtcaagctccgcggcaagccgttcgtcggctcgcagccaggcggcgtcggctttatgcccgacgacgtctcgccgacctcggtgcctgtcccgcttccgctcgaggacgactcgccccgatcgagcgagtcgggcccgccgtcgtaccagaccaactcggtcccgccctcggctcacggtggcgagtcgccggaccggcagccgccggcaaggatcgccaccgcaccctcgccccagtcgtccgagaagacggtccagcagcgtgaccaggaccggtctatcaccgacgaagacgctgcccctgccatcggcgacctgtcgaccgactataccgacgaggacatgtccgagcgcgcggtcacgccggacgccgttgatgacgacgaggaggagtcggccgcgcgcaacgaccgctccggcagtggccagtcggacgagcggacggacgagcagggaccgcgttcgcttcgcatcgcttccaatgcgtcgtcgagcatcaagtcgctccagtcgccgatccgcggccagttctaccacccggcctcctcgggcggccgccgcaactcgtactttaaccggacggtcgctaccggctacccgcttcggtcggcgatgaagggcggcaaggcccaggccagggcggcaggcgatctgcctcctccgacgcccggctctcccgtccgggcgacgttccggcggacggtcaataccaaggtcggcaaccgcatctcgcgcgacatgtcaaaccaccgcgtcggtgccgatcggtcctcgcacgtcgccatctaccagggcaaggtcggctcgatgccggcgccgatgcccgagatcccatcgtcgcccgtctcggcctattcgccgagatcgcaaggctccgaagacatgagccgcaagacgtcgctcggtctggtcgccgacggctacgccttgatcggcggcgccctcttctcggtcgcgctcaagccgatggacgagcgaggcgcggccgtcatgaagtcgtcggctttccagaacgccggccagctgtggactgtccagccctcagccccgcctgcccaccacggctcgtccttctagagcgcggtcatcagtcgtcgcgaggcgcagcgtcttcatatcctcttgatctttcctttctcgttgtctctgcccttttctcggtctctatcttttccacgtcatctcccgatccttgtcgcgtctgtctgtaccagcgctcggcatctccccctacccctattggaagcccctgcactcccggctcggccgagcgacatgaggacgcgcgcggtgcagtctgcgcgatcaggcacggctcatgccaccagggcctctctgccgtcaatctctgcaaggggaaaggcatggtaatcaaaggctacagtgtggagtacagcaggaggggacataagaacagagccagattggacaacatgaagagcagataatgagcacgagtcatggagatgagagacttaggacaggacggtgaacggggcgttgcgcggcctctccaatgcgagggacgtcgggacgcgagagccgagccggggcgtgccgacttgcgatgcttgaaagaccgcgcgctcgcgaaggttgatggctgtcacggccgagagaacagcgtcgagcttcaccgagagctcgccgatgcgggccgcgttgacattctcggtggagagctggggcgtgtcaatctgaccgcctgtgcgctcgatgaccaagtggtggtctgcgcaaaggaagtctcgcagtcagcggagctcggccgagtcgtaagcatgccgagcagcacttacgggcaagctgctggtgtgtgatgttttgcgcctcgcggatcctacgagagtggtgctcggcgtcctcgtccgacagtggctcaaccggcgctggtccagcatcttggtcagggacgacgtcctcgtactgcgcaggacagaggaagattcacaacaagcccaatcagtacaccgtctcagggcaatgcagggtgacaacacgaggtaacgtacctcgaggacctaaagcaggcagggaggacaaagatcagtcagcgcgcggctccaaggcgacgacacggctcgagagggaaacttaccttgagcaacttatacagccccgcagccagagatgctcccatcgccggaccgagccagtagatccagtggtagcccggaaaggtgtgcgcaacaacgtcgggcccgaacgagcgagcctaaggggaggtgggggggcatagtcatgatcagctcgatccgaaacgggcgacaatcgctggacgaaccgggttcaaggagccgcccgtatagtagacgccggtaagctcggcgatgaagagggcgagtccgatgccgacgggggcgaggaaggttgccttgtgcttctcggcagcgaggaagaggatggccagcatgaggagcgtcgtaaggaacatctcgaggaaaaggcctgccgagcttgcaggtgctagtcagcccgaggccatgttgaggagcctctgttgatttgagacgtaccctgcgcgatcgtgatgccgttgttaagcgtcgtccggacgagaagcgggccgggaagcaaggcgtcgatgagcgccgcgccagtcatgccaccgagcacctgagcgacgacgagcaggcatgcgcggccgggcgtgatggcaccgacgagcgccaggccgagcgagacggctggattgaataagccacccgagacgcggaagaagatccaggcgttgacgcatagcgagaagccgaatgagagcgaaatataaaggagttgcgatgggtcgacgcccgtgttaatcgactcgtctttttgccggcctgtatggaccgaggccagagaagggttcagcgtcagagcgactttcagccaggctggcgacgagaggcgcaccatcagggatattggcgacgttctgagcacgatcgaggggcagagtgacggatcagcctcaaaggctgcaggaaaggggaaacatgcgaagacggaccgtgccaccaaatgcgagcagcaagaagagagtagtgccgacatactcgctcagagcagcgacgaggtggttcttggtctggcggaccatatagcgcgaccagagcggccggtgcccgtcagcgtcgacgtcactccggcctgggatgtgcaggccgcccggcggtaggcccgtctggtgagagagcttctcaacatcgagttgctgcagcccgtcgccgtgcagggtcgtcgccattgaagagcgcgccatcgaagcgcgagggtggccgggcggaggagcagcggggttctgatgagcgtcaggtatgttgaaaagggtgcgagttggcgacgttgcggccgcagacgacatcgacgaggaggtcgactgcatgtacgaaagagcggagggcaggcggtcgaggaatgctgggtgagagatggtgagcgcgggagaagggtgcggctccccctcttcggtcgctctaaaggcctctcgtccctgctcggctccagcagtcatgctcgcgtcacgaaagcctatcttagacctcttgcgagcgatctgctcctctcctttggctcgttgtcggccgagggagcctacgagggagttttggagtgtcggcaagcgtggatgcgagccgggagcgggctgctgccagggcgcccgcctgaccgccctttgatcctcgccgcactcttgtgccacggcaccggcggccgagcagccggacgccaccagagtcaggaccgggtgagctgatggcttcaagtaagggtcggttgggccaagcgttcggcggcgtcagtgggcgagtcgtcgtctgggagggaccgacggacgagcctggcgaccgacggccccagagacagcaacgtcgggaggcttagtccgaccctcgaccatcgcccatgcttgtcggagcctaggcagaggcctgctctgccgctagctgctcgaggccgagcaggccgactgataggtttggctcaattcgcggccgctccaaacactgacaggcagggctcaggagcaagtcaagctcaggcccttcgcagctggctcctgccgtcgccgcggcggccgtcaacccaccgcggggccgttgctgcgagaagcaggactttggcggatccccctccttggcgatggatgctgctaggcagcagtgagggcattctggcagaacctcgtcgacagccttctcactcgctcgcttctatgagcccatcgctgcggctggcgcccctttcgcactcgagtcctgaaacatgcgcacggacggaatcggctctccatcagatgcatgtaggagcatccgcatcgtctatcgcttgtcggccccacccgccggaggctcaacattgccgctgctagcggcggcctcctcggtgaacagcacgcggacctggagagagcgggttgacggcgacggcagagtcagcagcgtggaagagggggtaaagtcgagccgacgcacctgggcgaccccctcggcctccttgacccgctcctcgatagctttggcgaccttctccgactcactaagcccgacacggccgccgttgtcggtgacaaaggcgagctcgagctcgatgcgcgcgcccgctccgccgttcagtcccttgaccgaccgcacctcccacgttcggctgctgccgttgccattgtcgaccgtctcctcctgaaggtcggccaggacggagcggacatcacgaaggatctcgtccgagcagctcgcgtcgagcaggtcgagcgtcgatcgccacgtcatggcgctgctctgcttcagcaggaggagcgaaacgaggagcccgccgagcgggtcgagcaccggcagtccggcgtgagatcccaggatcgacaggagtgcgatgaacgacgtaagcgcgtccgagcggtggtgaagggcctgtacgaacgcgacggacgtcagcaaatgccagcggttgaggtgggacaaggctcaaacaaacgtacgttcgccatcagcacgctgcttccctcgtcctcgccgacgcgcttcgtcagacggtacatccactctttgataccgacgctcaggagcgcgatccaggccgcgttcgggtcgagaacggcaccgtgctcatcgagcgcaatgtcgtgcgagtgggcgtgcgtcggcaggaagtcgggtaggtgagggagggaagagaggatgttgggcgtcgagaagtggaccatcgtcaggagctgacgagagacgtcacgggtggggagagagacggtgtcagcgatcgagcccgggcgcggagagatgcagagtgcgacgacgcacgttgtagctgtgcaggccgatgcctacgcttccaaggacgaggatggccgacaccgtccacatgccgaccgcatcgaacttgccgaggccgtgtctgtgtcgacgtgttgggggaacaaggcgcgcagcggtcagtgacgttccgatggccgcggacgacggcagcgacggaaggtggacgtacgggaatagcttcgtcggtggcctgcgcgacatgttgtagcagaacagggtgacaaagtcgcctagaaggtcactagccgagtgaccggcttcggccagcagggacgccgagttgaagcgcctgcgcgagacaaagaacggggagagggggttccgagcaagattaaggccgagcagcaacgacaattctcagcaacttcaacaagccggcacagaccgagatgaaggacgcaccagccggcaacgagcttcaaggcggtcagcccgacattgctcgcgaggccgtagagcgtgacgcgcgagccggggtcgcccttgcccgtcagggcgtcgacgagcgacgagggtgacgggcctggaccgtgcgagtgcgagtgcgatgcgaacggattgatcgagtgcgagtgcccgctgtggtcgtgcttatgctggtgaccgtggtcgtgcaaccttgggctcgtcttgacgtcggaggtgtggttgtgctgctgagccgacgaggccgaggtcggtcctggcctaggcgccgctgccttctccgctggcgagccggacgggtttggcggttgaggagatgtcgacatgaagcgcttctggctgactgctccagcagaggacgcagggaggagaccgagcggcgatgggagaagtgaccgtgggagggctgagctccggacgcggaggcggagggccatcgcgcgcggcgcgggcgggaggaggcagcgacaacggtacgagccggaggccaaagagcggggagtcgggtcctcggtcctcggtcggccgctgatctgtctacgggcggggagctgtacggggagagaggtctgagcggacaaggcgttgcaagatggcgttcggagggggcggcgaggacggtctccccgtcccggtttcgaatcagctgcggtcgaccgaccgacgacgacgacctcgaacaccattgcaaggacgagaccttcgagcagggcgacaaggcagcgatgaccgacgtttggtacgtgattgcaggaggcctgggatgtgtcgctttgagctgaccgcgttgcctgaccttcctcgccgcctcgccgttgtcgcaccctcaccacaaggcgctcgaccaagaagtggacgtgcaagtactgcgacgtcaccatcaacgacgatgcaccggtacgtctgagagcgacgttgatcgactcgagggcttgcgatggccgattgcaaccggctcgctgacgctgaccctcctgcctccctcacctgcccggcctcctcgcctggcagtcgcgcaacctgcacgagaatggcttccgtcacatcaacgccaaggagcggcacctccggcagatctacaagtcgggcgcagagaagaagaaggcggcggagctcgaggcgcgcgagatggagcggatcgaccgggtcattccactagtgctcgctgacttgcctcagcgtgagacacagtcactgacgatgagccggtcccttgtcgacaggccgccgccatagcccacgccagggacacgggcggaccgatgcctacgttcgcctcaagttcgaaaccgccgccagcagcaaggcccaaggcgagtggcagcggcgcctacacgtcggccgccgaccttggctacgtgcctcagcctgaggccggccccagctcgagggacgagacggtcggccaggcaggcgagtgggaggtcgtcgcccctttaccggaattgttgccgccgccacaggttgagggtgacgcggacgtagcagagggcgacgccgccttgctggctactcgcccaccgccgcggaagcgcgagtttggatcgaccgccgacgacgccgatgatccggaagagcctcggtcgttcaagttcaagcgacgagagcggcaagctttcttcgacgacgacgacgatctgcccgagatcaagctcaagcggccgtccggcagcgctgccgctgtcaagctggagccgctcgcagccttccggggcgtcgagtggggctcgcgcttgccagcggagggcgctgctactcttcccgctccggagtctgatgtggaggttggctcgggcgctcaggctgaggacgaggcggaggacatcaagccgacggcggagatcaaagaggagccagtcgcgctggcgctgcctcctccagagggcggcggcatgttcaagaagcgccgcgggccgcccaagggcgtcggcaagcggccgaacgtctgaagacagtctgtgacgcaggccatcattccccgcctcactccatcgggctgttcggcctcggcgggggcactactgaacggccgtttctcatcaccctaccagcaaacgttcctggttggcctgttaagctggccagcagccgccggattgagccgagcgcacgagggccgtgagatcaggcactggcgtcgacgtatcggcccgacctgacggggatcatgtaacggcgctatcgccggacccgctcgatctatctcatgcccgcgcttgcagcgcaatccctgttttgcgactcgactctggagagcaggaggcagcggcgacatctgagagcatacagccggccctcaatctcgagcgacgagggagcactctacaagcgacggtacaaggagagacgagctttgcgtgaaggtgcgaagagaagcgtgcgtttgcacgcacacggcagaggcaagggagaatgaaagggaggcaaggtccgatcacatgccgaagcggttcatcgtctgcatcgcgaactcgtagccgaggaaactgttgggaaacggggcgcgaggtcagcacggacgcccttcaagcgagcttgcaacgcggcagacgtacgtggcagcgtctgagccagacgagcgacacaagacaggggggagcaagcggtcagcatggtcgcctcagggcagcgagcggcccgaagtgacaggtgcacgcactggcagggaaagcccgcgtcatggccgggccaaagcccttccagagcgcccgcacgccgtcggccttgatggtcttggaggcgcagtcgatgaagccagagtacgtcccgctcggggccgactgaagccggctcttgattgtctgcgaagggacaggacgcaacagggcgtggaggtcagcacgagcagtcgagagagagcgagaccgtcctccagtgagccgcacgtcaggagggatcgcaatcgaccacatggcaacaccagccgcgccgccggcgaggatgatcgcgccgaggtcgagctttgaagggtccgagccgacgggcgtcattgacttcttgatgacctcgtaggcaacaaagtaactgtataaggtgagaaaatgcacgttagtaaagctgtttgcgcagctccctgagcagttgccgaagcgtcagcgcagactgacgcagcgctgcccggcccgtcacgggcgagcgtcgcgcccgtcccgcggaagaccgatttgaggccgccctcagcgtaaagcttgcggacgacgtcgatcggacccgaatactggacaccgtggccctgacccgagacctgccaaggcgcggtcgagatgtcagtgcgggcagacgagcattaaagggggtcggcgacgccgacgcacctgaagcaggaccttgacgcgctcagccgggccagtgacgagtgtcgtcggaatggccgagaagaagccggcaaacgcgagctgcgggagcgtgaggtccttgctgacctcgcccgtcgccgtcagcgtcggcgtcgccggcgggaggaacgacgtcgcgagcttcttgccgaggtcgtaggaccagaacgacagagcaaagatgggcgtcacgccgaccaggggcgcgcccatgccacggtagagcctggcgatggaaggacaagtagctaggaggtcagcggtctgtccatctgctcgggcagcacactgcgacgcaccctcgaacaccgtcccgggcaagcgtcttcttgacaacgtcgatcgcgcccgtgtacgtccccggagcagccgtctggagccgcgtcttggtcaggtcaaaagggtggcctgagtcgcgtttgataagcagagggtcagtatggccgacataaggcggtgacgcccgggccgacggccgagcgatgaagtagacgcgaagggctcaccgacaaggacggtgcagatgccgccgacacctccggcgatgaaagcctttgagccgccggccgacttgacctcctcctccttgaactcttttgcgccctcgacgaacgtctctttgagctcgaccgccttgtgcttgagctcggccgcgctcggcggcgtcggggtcgtcgtcatgctgctgctgtggctgttgttgctggggtctgttggggagctggcggctgatggaggcggtgacgactcaaacgggttccagacgaggtagctgaagagagggggcagcttgggcacgatgtttggggctggcttataagaggtgaggctggtcggagggacggagaagcaggccttggcctcgtcgggctccggcttgccggctcgacccgaaccgatgccgcgcgcgcgtgtcaggccgctgacgaggcggcaagaaccgggacagccccaaagtcacacaggctgggcggcagatacatcgattacaggacgagagtcattacaaacaggcaaggaggttaaaccttctcagacgcagaagctacgtcaaaaggggcggcagtgtcgccttcgctgggtgcggcctgcggcgacgttgcgttcgcatgccgccggcggctcgccagtcgctctcgagggaccatctcggagaggcagggtgcgataaacctgggcaagggcaggtgcagagggcaaaggtcagtaacggtctcttgtgattccacgtcgcagaccggacgcacagcttacccctaaaggcattgatgatggtcaggctgccaacgagaagccagttgacaaagacgatgccagagaaaacggtgccgagaatgtcgagcgcggccgactcgagctggtggccgaggagagtcgtcgccgttgcaaagacgccgagtgggaaggtcaagctgcgggcgaggcgaagctcgtcagtcacggacgaatgagaaagacagggagacagtcagacgtacgcccaccagcccatgttgaacgtgatttgaccctcagtccggatgcgatggatgaccgaaaggacggcgatagcagcccagatggcgccaaagccccagatgacgagcccgatcggcatcgtcgcggcatagatggcgagacccatcgtccggccctcgtcaagcgtcaggtcgccactgatgagcccgaccgagccgtcgagctcttcagtgctgagcttgcggacggtcgacgcgaggtggaggacggcgtatgcgccagagccagtcgggccaagcgggaggaaggtcgagatgacctgcgcgccggccgggaccttgtaaatggcaagacgggcgtgcaggagcccgagcaagaggaaggcgacgggaaagcccgtgccccagaggacgtacgagaccacgacggtcaatctggacgggcgaggcggttttagctcgcacgctgcagaggctgacatcagctgctagactcgtaagggacgcaccgagcttgggaggatgtcaggatctcggcgacgagcgagcccgaagcggcagcgacgatggtcgcgactgtcggcagcagccaggcggccgtcatgtcggcaggggcatggacctgtgccgaaaacatctgatacggaacgccaacgccgatgacgacggcaaggacgacgttgatccaccagaggacccaggtgaaggtgatccagccgccgccccaggcgggtgcgaccgccatcgacatcatgttgactgcgcgggcgccgagggagtcggggccagagtcagcggcgggcacactcgctctagaccgtcgacgcaagagcgacgcaccgatcgttgacaaggccatcgggaagcagccgagaaagagcgactgggacggatgccggagcatcgcgtgccagattgacggccagagaatgtagcgggctctgcaagtcgacagagggcgaggccgttagcctcttgtgggccctgcaaagaccgatccgagcgacgtacagtgacaggatgaagaacgagagaaagaggacaacattgagaccaaagacgacgagcgcaatctggccgacgaagggatgatacgtcagcggtttgtttgcgcccgacggcggtcgggtcagagcgggacgacgcacgacgtccagccccttgaactggtacggcaaggaatgggcgaggatggcggtgataccggttcccatgctacaggcgaaccagctcggggtactggtgagatgcaagagatgggcgaaagtcagcggcggagccaagacggagcgctgtctcgcgcgaggccgacctcacaagtgcatgcacgcccgccggagcttgacgacccagggccgcgagagccgcctcgagcgcgagagcaggagctcctcgtgcgtgatctgctcctcgagcgtcgactcgtgcggctcgtcttcctcgtcgaggctccgccggtcggcgctcgggtcggctcgcctccgggagctgctgtagcgcgtgaagcgccggtcggtgctcaggctcagctggcggagcggcgtccgtgaggtctctggattccgcggccgaccggtccgagcctgcgaaggagggacggccatctgtgctggctcgatgggtgtcgtggttggggaagagaggacgactcgtccttccgccctctgactccctttccgggtcgtcgggttcgtggctgcgcgacctcgtcgcgcccggctgactgacgtctccctgttagggtgcaagtggcgaacaggggggaggctggagctctgacgggcaaggacgagtgatggggggaacaaagaggcaagcttgagattcaggtggcgactcgaggtctacaggggtttaagtaggctgaagtgtgatggcgaagaatcttctgcaaggctgtgcctgctgacggatccggtggagatgctgactgatccggtggagctggtgactcacgccggcggagctggtgccggagaacgaccggcggccgagggttgccgggtctagactcggccggtggtgatcgggtgtcgcgctggatgttccacgtgaaagttgcgaaccggtgacgggtggggaactggtagtgcttgacttctcttctgtcgtgcgggctgaggccctgggttcgaaccccaagccggggatttgctgttcctggcaggtcgaaccatgacactcccgcggccagcagcctgtattcggaggaactcaacccggcccgctctctggcgtcaaatcaagcgtacaaaaggcggacccagccctgctcgtctccatttggggcggaactcgtccgactggcgttcatcttgccgactctgaataaaacgaccctgcttggtggccggagccagacgcgcgatctcatcctgccggcagtgcgagcggtagcacacggctcgtaagttgtggtgcgcctacccagcctcacaatctagctcgcgccgggtccagacggcagaagtcggattcggaaagaagaaggatgagctgctgaggcctgaaggtcaggcgagaggcgttggtctagcggtcggcggcaggacgacgaggtcatcgcgcagtcagaccggcctcgtagccaagcgagtgacctcgcgtttgctcattgtcgcacctgttcagatctgaggacggtagtgatagctcgagagcagtattgggagactgtcgagtcgggcaagtggcgacgtcaagacccatgctcgggacgagcaacgctgcgcctgtcggcgagcgcggacgacgatctcctgcgccggctgcgagcctgcctcctcaaaccctcttcttgcctcgctcgagcgatggacgtccctgactcgccctctgcacctgtcaagcgcgccgtctcaaggacatacggccgggcattccgccagcggacctcattcggcggcgccggcaccagcggcgggagcagcggcgcgtcaaccccgtcggccgctggcgcgccgtcccgacgcaaggtggccgacctgtcgagcagcgatgacgaggcgggctcaccgctacctcagatcaagaagccgcgtcagtcgctgcctactgcgggcgccagcaccgttcgcctgagagcagggacgaagaggaaggctgctactgtcgttgaggcgccgacgcgagcgagcccgcgccaggcctcttcgctcaaggcctcatcgctcactgagggcatgtcagccgatactggtgcgtccgaggcacttccactgtcaggcccagcttgagtggtactgaccggcttgttgggaatcacctggatagtcgcctcgtcgagcaaggcgaccgctgccgccgtcccgcgattaacaacgccgtcgaaccccgcttctgccggtcagaagaccaagcgctcatcagaagcagcatctctgtcgctcgaaagcgcatcaagctcagcagtgcccagcaacggctcggctctcaagtctgcaacgagctcaagcagccgtcgggccggggccggtgtcgaccggaagggcaaagggcgcgcctcggcggccgggatggagatcgtccttcctgagccgaggtcgtcacccgctagcgctgacctgggacagtcgccgacgcttctcaatgtcggcaaggccaaactgcttttacagccgagcactccatcggcgtcaagccggttggccggcggtggtgagccatcgcgcccagctgcgcaaccggacgagagtgcgtgtgcttttccgtaactactcggcgaatcataactgacaatcaaaccgatgtccataaatcgcagagagcagcgaaccttcatcactgtcacgccctgcgccggctgcctcagctcgtcttccgcccgctcaagccaagccggaggcccgcgcgccgcctcggcaggccacttccctcgcgccgcactcgcccaagcggatccggctgtcctccccaccggcgcacctgaaggtccagacaccgccgggcgacatcctccagcaggccgattacttctcttacccatcgccggcacgcaacgtctttggcgccggctcagctgggccctcctcccctctgacgccgctgtcgaggtccctcgcccagtcgagcccgctcagacgtgttctacctccgacgtcgccgacacgcaagtcgacgactccacagcatcttccgccagcgagagcgaagccgacgcccctcgtgcccgcttcgccttccggtggccgcacgccgaccaggtcggcgaccaacttctcagccttgttcgaccagcacgtacggggctcagccagcagcatcgggagcgctggcggcgattttaaggcggctgattcggcccgaagcccggcggctgcatcctcgtcgagcgtaacttttggaagcggtggcgtcgacgaggagggcgggagcctcggcaagcttgtcaacctcccgtccgggaggcgacgtgtcgactgcctgtttcaacggagcaacactgcgccatctctcatggccggcggcgggaggtcggcaggctcgggcgatcggacgctgcgcgacaagcggaccctctcggcgctcttcccgtcgcctacccggccagagaacgacgagcctgcaccgtccgcgctttgggacatcccggttcatcattcgccgcctgcgtcgcagatcaactcgccctcaagcctctcgcccatccgcccgcaggcctcccaacagcagcccatcaagcggcggacttacggcggaagcagccgttcgatgctcgcgaatcttaatccgcttgacgacgccggcggtagagatggggtcgagcgcgaaagctacgctaagatggcgaagcgctggggtgtcgaccaaggacggacgggtgccaacgagaacgacttcgtcgacgtgcgcaaccttccgcgacgtttggtcggtaagaaggcagactgacgatgtatctgcgcttattctcgtcgcaggacacgatcgagctcacgaccgtcacttcccttcgcgcgcgaggcgaaactcagtctttcatggacgacctcggctatctactcgatggactgcgatcgaacgaggtcggcgtaaaacgctcgaggtttgtccacattgcgggtgaagctgcactggatgcccgactgaaccctttttcgccttgctctcagctcggtcgacctgctgcgcaagatggtcgctgccgactttcgccgcagcctcaagacgtacgaccaggtcgaaagcctgtggaagctcctcgtaaccgcgagaggcgagggctccgacacggtgcgtccttgcaggttcctcaagatggaagcgcgtcctgacttgctacgaatgcgcgccgcaggtcctcgacgctagtctcgcacttttcctcgcccttctcgcccgagatggcggtcgggccctggagactgtcctcactctgaaacgaggaggtagcctttgcgttttcgtctgccaagccatgatggcagcggaagaagcggatggctttgcgctcgagcgcaaagccaggctctcgaagggcaagggtaagaacaggagcatgctcaacatggtgcggtcgtcggagcgatatgtctcggcgaaggctgcagcgggtagctgacgcgtctgacatccacctccagatggctgacctgcgaaaagtctggctggatgccgagcttggcggccaagaggtaaaagacattaaacccgttcgtcgccgaatgagcgaactgacggtcggtgactttcttctttcctcgcagccgtcgctccggtcggcggcatcctcgatcctcaagcacctcgcgtccgatggagtaccgaaaattgatgccctcgaactgctgcgtaagggaggcgtgactcaggtcgtcgcccagtcgctccacgacgagattacccgcctcccgacgacgctgagcgcaatcgaggccggccgggtgcgtgtcggtcggctccgtctcagtcgaatcgtgcatttacgagtgactcggccttgctcgactctacagccgctcttcggcaaggatccgcagtgcgactttcagcacgtccagcagtgtctcgtcgtgctcgatcacctcctcacgcgtcaccctgacgatgtcgctgcggtcgagcgtgcctttggcgacctaccgagcctcctcggcgccctcctcactgccgcacgagtagagcttagggacccctcgattggcgcttcctcaacgacgagttcgtagcccttcatgctctggtcagaagcgactcgcgcaactgacgaaacagcgacggtgctctcagtcattctctgccagatctccaccctgcgcatgctcctcggcctaacgactctcgttccggtttgggcggccatcgctctcgaggcaccatcgcttttgacgacgctggcccgcctcatcgaatcctcccggcggagcctcgacgtccacggcggtcagctggacagtctcgcgcagaaagagtctccaggctcgtcgccgctgtcggctgccccaaccctacaaccctcctctatcctggcaagttccgaggccgacggcggaatcgacgtccggccagaagacactccgacggctcagctcgagattctttgcctgtcgctcggcctgctgagcaagctcgtcgagacgacagaccggaccaaggcccttgtccggaacacacagacggcgccctcttgcacggagtcgggaccatgcgccgttgtttgccgctgctcgaagactcgttcgacgctgctcgtcatcgtcgacttgtacgaggatcagcgacgcggcagcagcgccgaggtaagttcccagccatcggcaagctaaaagcggggccgacgagactgactggtcccgtgctttcccgcaggcctcgtacctcgccggctacgccgtcctgcttttgtcgcatctcatgcggcgatcgtccgagaacgcggccctcatcctgccagccgtgagcctgcaaccggtcaagacgtctggcgcggccgccgctgaaggatcggactcgcagcgcaagctccggtcgctcgcggctgagctccaggccttttcagaaattcatcagcggttccacgacaagctgtcgtccctctcgcgtgcggcgggcgccaatggcgacgacaccggagggctcgacctcggcctcgacgccgagggcctcaaggagatccagacgggcgcctcggctctgccgagcaaggaggcaggcgttggcgccgtgctcgagatggttggcgtcctccaggcgatggcggcagccgagggtgacgggcatgcctgagtgcccaagcaatgtcaagctccttctcgacccctcgcaaatcggctctggaaaggggaagggcatggatgtggcggtgaggggctacaacgacgggagatgacgagacaggaggtgggtgcgtgagagacgccgactcaggccggccggcgcataaggcggaggccggccatggcgtcggcgagagcggtctgctgagcggtgtacgaggccttgtagcgctcgcgcagcaaagcgacttcgtcagcgcacttctggttggcgacgcggcagtcggcgaggtcgccggcgatctatcgggcgagcagcaggcggcacagtcagacgtcgtgctttcatcagaaattcgggcatcgcgacggaccatttcgagttctttggtgagctgcgcgtcggcctgatcgttgcggacgaggatggcctggttctcgtcggcgaaacgccggtgcagcgccgtcagcttcaactggtactcgaggctggcgtcgcgtgcgccgttccgagtgccgtggatgcggcgggcgaccttatcgacgagctcgtcgttgaggccgtcgagcatctgaacatgtgcgccaagatagcccggccaaagatcagcggtcaatggccgctgcgcccgtctacaaacacctgcgcaccttcttgagggcctttgcctggggcggatcgttcaaccggccggtggccgccctctgcgactgggactgcgacgctgcagatggccggtcgggcgggtcagttcgggtcagagactgccgtaggcatcggtgaggctgagcggggacgtacgatgccgcttgacctgggctgtcagcccagcgctccggggcgagaggacggtcttgccccgctgggacgggcccgcttgtccggtcgcagtccgcccgacggtaccagcagctgcgcgagccggctggtcgtggccagtgatctggctggcgggctcgggccgaagctgggcggcttcgcccgccgcaccactcgccgtggcggccgagccggccgtcgactcgaagtgcggctcggcgaggatgtactctggctgagagagtacgcgagcgttgcgcaaagcagcggcgctggtggtcggaaggccaggcttgacccggtcggtcgcggctggccccccgtccggtcgcggctgaggctggatgggcgacgaccggggcatctgaagggtcggccggtgcgaggttacggtgtccagtgctgactggtcatcgagcgccgaccgagcgtgaacagcaggaggctccgagaacgacttgtctgcagcggaggcggtcagcaagcgccgctgtgcgcgcggggttgagtgagcgtcgccgaggacagccgtcgacagcagacgggtgtcgggcatcgagggcgcctgcacaacatgtcagctcatgtgtcgacgccgaacgacaagtgggaagttcgcttcgaacgtacctcgtcaaagacgtccatgtggtcaacacgctcagcttcgaggcgctgctgcatctgctcctcgagcgcacgggcgcgtgcctcctgcgcctcagcagccttgctcgcctggatctgaagtagtgtgaacggcggtcagctttgtatcagggtatcaagcgaggtctcgcgctggacgttccttccatggcgtcaggctcgttctgcccttgctgagcgaatgcgtcgcggacgaggcctcttcagtggccggctgccctcgcgccttgttcgcgtccacatcggagaggatctgcgggccaaagagtgatcaggactcggtcttcgacagctaactcgtcagcgagtgtccacgcaccgatgactggcggagcgcgcccggccttgagaagacggacgaagcggaaggaaggcgcggcgagtcctggaaaacctggacggccgggctctgcgagacggtgctgaacgagtcagccattgagcccgaccaatgaaaaggggctgacgtacggcagatcgcgagcgagcaaccgagaccttcaaccgcgccgagactgaggccgtcgactcggcagccggactgaccgcctacaaagacgaaggaggcaaagacgagagcgaagcgtagacgcgtcagctcagccagggttaatttcggatgcgccgaccaaggacggacgactggttcgccaagcgactgggacatgagctggcttgcctgcgggatcgactcggacgcggccatctcgggctcgtagtccatgccgccaccatcgtacgagactggctccgacgggcctggcgagccgacgtctcgctcagacggcacctcctccatccggtttgcctcgtcgacgggctcctccatctcggcggtcgtcgccgtcccctacgaaagtgagaagcggcggcgtcagtcgccctgcgccgaaggaagctttgcgagagacgacgcaccgacggcccgcggaaagcgcgaggggagccgagcgattcggacgtcgccctggcagcgcgttcggcgccttcgtcttgacctggcacttgcgctgcgctgcgcttggctggtggcgactcggcacggccttcgttcccgaccggctgccgggctgtttcgtccggcaggtagaggccgctctccttctcgccactaccagccgatcgtttggacaggcgctgatcctgcggcgtaaagtcctcgattggagactcagcgtcctcggcgtcgacgtcgtccatacgctgcgagtcgtcctcgatctcctccgacatgccgcgcgagatctcctccctggcgtgggcagctgcccggcgggcagggagggcacgcgtcggtcgctcggagcttgcctgggtctggtcgctcgccgccttcgagggctctgcttttcccttcgctggcggcgccgacttctttactttcttggccgccgccggcgctggcgacgtcttcttggtgcgcggctttggcttcggacgcgcattggcggctggctttgcgacctcgcgcacgccgggcaggtcgtcccatgtgtcgtcggcgaccgaggcagccttgctggccttgagcgatgttgacgtcacctttatcgactgcgcagatgccgttgacgtcggcttgccgctcgcccgggccgccttcttgccgtacgacgcccgcggcttgactctcgccttgggcggcaccaacgtctctggcttgtctggcatcgactcgccgtccgacagcttgtccggtacccgggcgcgcttcttcggaggcgagttccgcggcgaatcgttgtcgaggacgatcgtctcgtcgaccagctcatctgcggaggcgtcctcgcggcgcttgcgcttggggcttatcggcggcgtcttgctgcccgccgacgagggtggttcggccggctccgacaggtcgctgccgaggtcgctgacgtgacgaatcgcaagcgaagaggcaggcggccgaggcggcggccgcggcgctgccttccgagccaccgacttgcctttcgtctttgaagcatccttccgtggtgacgagctcacagcctgtgccgcggctgacttcgagcccgatgtcgtcgatgacgtcttgcgcgacgatgtagagccagactggacggtctctgaagtcgacaggccgggcgattgggtcaaccgacgtccgacgtcatccgaggatgggtacttggactcacggctgacaatcgctgctcgcgcttcggtcgcagcgctccgtctcggcacggctttgtcgggcttggccttctcgcgcgctccagcctgagcgagcgcctgctggccgggatcaggcagccggaggtcctctgcggctttcgacgagcgaagggaggcggaagggttggccgtcggaggcgggatggcgcaagcctgagcgcccgaaaaggtcggcgatgagcatcagcctggcgagctaccaaagggcaagcgagaatgcccgctcgacgtacaatcggccgttggcttaggatgtcgtagagcttgtggtacgggattgcgaggacgatgcgggcctcgctgttggtgatccggatgcgaaggacggtcgtcgagcctgcgagcacggcagtgcatcagtcaggggcaggacaccgacgagaaacaagtcgtggatgagatgactgaccatcagtgccgctcttctcgtcgaccatgatctcgagaatgtcctcgaagccaaggaccattgcctgcgtcggagcgcacagtcagtgtcacgacacgacagcctgcatcggggcaagacgcacattgccgtccgcatcgatgttgccttcgaccgcaatctcgtcgcagtcgatgaagacgcagaggaggccctggcggatcgcgttctgatcagattcgctctggaggtgacgccggtcaacgccgtcttggcccgtgtcggcaaactcgacgacaggcacgggctgcatactgcgcttagaagagctcgaaaggtcagtggctaaaggcagccgccactcgggcgtggccgatctagagagagacgcacacgtcgaggccttcctcagctaggatccgcaagatcttgaagcgcgtcacctgagcgagaggtagcctttcatcagacagacgtcgccgacagacagagagagaagaggatcctagtgcgggaggacgcactgtcatccactggctgcttttccccctgaccatctcagcgcccgcccgtgcggcaatgtcaggccggaagcgaccgaaacatgacttggcaaaggcgacgcgctcggccgactcgcgagggcctccgggaaggagatggactgcgatgtcgaggacgtcgaggaaggcggcgctcgggcctgcaacggcgcatgtatgcgtcagcgagggagccctcagcttttcagaagggaagacgaacgcaccgactcggaagcggtagagcaggtcggcgaacttctcccggctgagtagcgccggatggccgtcgacctgatgggtcgcgtactcgatgatcgacgactcctctgtcaggacgctgagcaagtcgatgatgtcgcgctggaaccgtctgaacggggccagcgtgtcgtcgaagagcaggtcgcagagtgtcgggaggagcgccttggcgagcatcagtagctctgcggtagaatgcaagccgatgcgcgagtcagccgagatggatgtcagggttcatgcacgcaagccgctgaacggacccgtctccgacagctcgttcttgacctgccagttctgtagagcgcacaccagtctagtcagcagccgacgacgaagcagaggggcaagaccaaggcgaccggacgcaccgtcgctcctccgagtacacgtccggcacacgcagcccactcgtccgcctgcttctgcgcgtccgggtctgaggcggcccgcttgagcagcggccgtccgcgccggtcgataatagcccgtagcgtcgccgcgagcagcgcgagaagcggctctgctaccagtaagaagagaggcacggcgtcctggcgcggccgtaagtgaatggtccgcgcgtcagcggcaagcacgacccgcagcggccgctagctgtcgacagaccttgacaaagacggcgccgatgtcttctggtagctcgaaggcgtcccggccggtctgcgagcgacgcgtcgcgtgcgtcagcgaggggaggtgcctggcccgccaccgcagcgggcgctgcaggcaagacgccgagagagaggaacgtaccacgagcggccgcagcgtgtcgagccagtgctcaacagacgccttgctgttgggatcggcgaggacttgggcgacctcgccagtctccttgatgagctggtcgagcccggcttgtccagcggccttgccgacaggcgcagccgaccgcggcgaccggtgcgactgcatccggccgggatgactcgaggaggggttgtcgggtcgctgttggacttcgatctggtgtctggtgcaaaggcttgcttgagggagtaggacaagaccttcaggcagagagggtggtggtgggagctgaagggaaggcgagcgacaaggtgaagggtcgcgtcgctccgcagtcgcgccgtgtcgaagcagcccccttgtttcggccgtgcgtattggaccggcgcactgcgattctcaaacaccgcccctttgccgattcgtcggacaaccccggtcgtgcactgacgttagtcccacagagccgcgtccgagaaggacaagactcgtcggcaggagcagaggagcgaaggggttcatctgagagagacggcccccatctcgcccagctctcgaagcatcagggatcccttatcggccggcccttacaggaaagatcaccgcatgcgagcggcggagcaggtcggagacgggctggatgcgccatcgcacatgtgcgctttgaggccgtgcgtgcctaatcggcgcgcgaagtcgcgttcgggcccggctcgggcggccgacgtgcagcgctgagcattgccgagcacagctcggagcgaccttccttcggcaacgtcaggtgcgccaggatggccgccagcgaatcgggcgagtcgacgtcgagcggccgtgcaggtctcggtcaagctggcgatgattgactgacgcgcccactgctcgtgctgctgatggggcgatcaggttagggtggcatcgactgggtcaagcaggtcgacaactgacgcgtccacaccttcgcttcgttcagggagcggcaagacgagtatgcggcaggtcatcttgtggcagcagatagcagctctactcgttgagcttgaacggatgagtcctctttggcttgacctgcgcccaagattggccctttggaagcctgaaggaggaagtaaaggtcgcccgtcagcggggccgactcatgagcggcggccggcaagccgccgcccgggcgtttggaggcacagagcaagcgagcgacacgcacggctcattcagcggcaagacgccgtcgttctcgaagatgcgctcgctgacgtcgatcgcaggcatgcctgggcatctggacgagcgcggcggtttgtcagtctcggtcaggtcgactggaggaagagggcgacgagacgcacttgcggaagatgcgcggaatagggtagcacgttacggtcccgcccggtatgcgctcgcccgtttggggcgagtagttgaagtgcggctggcaggcgtactggatgatgtcgaacagcggacaaggcgggttccggatgcccgagtcaaccttgtccggccgctgctgctgctgggacggaggcgagccgctcgctgctgctgctgcggccgccgccttcttggacggccgtgcgccggtcgagtcggccggccgcagggaggactcgacgaccatcctagcagaggtcgagacggaagctgggggcagaagctctgtggagggatgatggtcgagagaggcgttgtccatggacgagctgagcagaagcaaggtctgcctccgtcgtcccctttcagcccgcgatgccctttcgaccggccccaccaaccacttcagagggctcgaagtccaggcctcgcgcctcgccgcagcggtcggagctgatgatccgtcggcccccttgccagcccgcggccatgtgcgagaagctcaagcatcgagcgcgggcggcatgagtgagccgtgctgctgacgttgctcgcccccgattcccacagcagaggatggctggcccggagcctccgaggcagagaaatgacttgctccccgcccctcaagagggccggtcgtcggctggtctgtcgtcgagagacgctcatcgacacccccttttcctccctcgccacccagcctatcctcgcgcccccgccgcccttccccgttcgccagcgcccagcatggaccgtcattcgtccgacgacagcacgcgagatgttctgccgaggcacaacccagtcaccaaccccttgcaggagaagaagcctgccaacccgcgcatgaacacggccgggaccgcgccgacgcagcgcggccctcgctgggcccgctgggcatcgctcagagtcaagaaccactgtgagtcgtggcctaccggcgctggtggtgggagaggatgcgtgccgccgtgtcaatcggacacgaccgctgaccacttggcctcctgcgaccccctccgtcagtcgttgcggccgtaggagagtttgtaggcacgacactgttcctcttcttcgccttcggagccgcccagattgcaaacattccttcgggttcgtcctttggctttggcaaacggcttcccagacttgcgctgatcggccgttccactcagtctctatcacgcaggacaccgtgaccaatacgtcgcagctgctcttcatctcgctcggcttcggcttctcgctctgcgtctgcgcctgggtcttcttccgcgtatcgggcggcctcttcaacccggccgtctcgctcggcctcgccctcgtcggcgccatcacgccggtccgagccggcattctcgtctttgcccagctgctcggcggcatgacgggcgcggccatcatcgaggtcctgcttcctggaccgctttacgtcaatacgacgctctccggcggaatcagtgtcgctcagggtacgccctcgtctgatttcgagcctcacgcgatggtctttctgacctgacgacgtccttttgttgcgaaggccttttccttgagatgttcctcaccgccctcctcatgctcacgatcctgctcctcgcggcggagaagcacaaggcgacctacctcgcgccggtcggcatcggcctgtcgctctttatcgccgaaatgacgggcgtttactggacgggcggttctctcaacccggtgcgtctccacgcccaccctccgtttgctcgtcggcagctgacgaacgactctcgatttatgcaggcccgctccttcggcccggccgtcgtctcgaggcgcttcccttcctaccactggatctactggctcggtccctgcatgggcgccaccctcgctgctggcttctacaaattcatcaagtacctccaggtgcgtagctcgcctccgatcgttcgaactgcgcccgtttttacttagctgacgtctccgctgctgcgtctcagtacgaggacgtcaacccagaccaggacggcgagtcgcagccgccgagccagttccagtcgaggtcgtccaagctcgccgagaagatcaggcgggccgagcaggcgacgcgcgatacgacggcggctcatcggcagacgcttgaacgcaacccggtacgtctcgctaggcagcggcagaatcagaacttctctcggacgctgacctccacccctacacttctcgcctgtcgcaggcgagctatcaggccatcccgcagaacctcgcacctctcggcgctatgagtgccgagatcgcgcacgtcgcccaccagtctgagtcggcctcggccgtccaggaggccaagtttgtcgagctctcgctcaagctcgacgccattctcgccgccgtctcgcaccaagcaaaggtgaccgaggcggtcgcaatggccacggccgatgcgcctgcgcccgacgcgccgcacgacgcgcccttcaccgtccttgcctgagcacgagggtcgcagtcccgccaatctcacgaacgtccgatgtctctctacctctcttaatccgcatacacgctccccacgctccgcattgcagcacgcactcttgtattcatggcttcctcgcatcgccccagacctgagcttgctcgatgaccttgcttttgacgaaaggcgggaagcagacgagctcgagccacctcggtcagaccagctggccgactcgcaccaaagccttgatcgcagacggtcgtcggacatgagaagtggcagactgacgagacgatttgctgagactcgacgagcgcttgtgcagggcagcatgaatgtcgatcgaccgaggtcggaagatgcaagacatggggaaatcggggtggtggtggggcgcgagcggtacagcgagcgagcgggcgggcaagatgaatttgagatcgcgcgcgggcacgcagatgatcagggtccgtagagtagggcgaagggggaggaagcgccgaggcggagggaagaaaggagtaggaagggaatgaaaacatgcagagatcggaggatggagcgcggacagaggcgggggcgagagacgactcaatgggtgatgccgagcagacgggggtcgcgactcgctgtgacgacgaggagggaggctgtcaggttctgaacgtcttgacggcgcacgtccagaaggaggcagcaaactcacgatcaaaagatcccgagcgaccgctcgacggcaggaagccccatgtcggccgccggcgaccgccaccgacggctggcgtcggtttcggctcggcctgctgctgctgggccggcagggcttgcgatttcggctgcaggaggccggccgacgaggacgacgtatgccgggcggaggaagcgtcgagacctggtggaagaaaagttgaatcacggtcagcccggcgagctcgagtggacgtcccctgattgaagcaagcgagcaaggaacggggagggcgacctgctgcgcgggaaggcagcggcaaggccgactaaccgccacgccttgagcagcaagccagggtccacctcccccccttgatcaggcagatgagagaagcgagagagaggtacgcacgggactcgccactccgactgctcgcagtcataaagtcgaacgagaagggcaggccgccgccggccgtctcagccgccaacctgctggcgccgaaggaagccgacgacgggccggcgactgtagaagccgccgaggccgccgcgacgacgggcgtcccgaaccagcgctcccacgagccggcgaggccagaggcggacggcggcgacgacgacgggctgcctgcggcgctgctgctggctgtggacgaggacgccgaggcgacggcggcagtggtcgacgacgacgacgtcggagggtaggggctgaaggcggaggcgatcgaaatcgggcgcgacatggtcgggcggagggaagctcgggaggttgagggcaaggggtaggggacgaggaggggactcggtagaatcgaggctgctgtcgcgagcaaggtagggtaggttgctgttgagctggtggtggtgggtgattgtggcgggggtgtagaatggccgagtcaagggaaccagcgagcggcaagagcgctcgcttcggccgtcgtcggctcgagcccgaccaatcgcccacgtcaggcagccctcgactcacgtgagaccgcaagcgctacagccatcggttcactgcacggcagcaagtgaaaagaagcggccgactggcgcgctacatgctcatgccgtcgaacaggcctaagtgcggcgaggggtccttcgcccttcggcacagcgcagctctcgagatcacgcgagctccagctctcacaccatccgccctgccaatcgccgcccgatcgtgttgcgaaagagatgctttcaagaggatgaggggacgaccgacccgcctaaaggtcaaaggtgaagctcgcgccgaccttgtggccaggcgcgccagcgaccgggttcgagagccgaacggtgtcgagggcgagaccgaacgaggccttgacgcccggccggaggccctgggtgtagccgaggaggacgacgccggccgagttgacctttgccttgacgaacgacgacgggtcgaggtaggcctttgtgccaagctcgagcgcgacccggccgtcggacgacgccttgcggtcaaagacggccttggcgccgacctcgacctcggccgagagccggtggtagaacgaggccgaaaagacggagccgttgccgagcgcgtggacggtcgcggcgtaggtcggctgggtgaagccgacggcggtcgcatagcgcgcaatctggcccgagcgggcgtcgccgccgacctcagcgccgacgaggaagccgcccttggagaggacgacgtcggccgcgagggcggggcccttgaagaggtcgaccttggccgtcgcgtgcaggccgggcgtcttgtagacggcgccgaggacggcacccttcgacccgccgggcgtcttctccgagccgggcgtcaggacggtcgcgaggtcgagtttgagcccacgggcgagcgcgccgtcgagctcgatcgtgttgcgcaggacattggacgtgttccagacctgtgagcggacgagaagagctcgtcagcaaggccgatctgcaaaagagcgtgaagcgagccacagcaggcgaagggtgtgctgccgctgcctctcatcggagcgtgcaggactgccactggcagcagccccccctcccacggccctgcctgcggacgggtcgcgccctcccctcctacagcgacctagcgcactccgacgcacctgggtgaccgacaggcccttcttgcggtcgttccaccggccctcaaagtcgccgttgacggcgttggacgcgctgtccttcgtgccgcgggcggtgaaggcgacgcccgagggcgccttggccttcacctcgagctgggtgcccgagagggggtagtccttcgagaggaggtccgacgatgacttgccgacatcctgcagttcggaagttgggtgtcagcggttagagacgacggcgaaaggagggagaaagagacatgatggaagacgcacacgccacgacggggggacggggagggacgagaagaaggaggccatgctgcgagagggcgaagcggagaggcaggggagaagggagatgcgatgtcgtgtcagcctgggctgcccttctggcgatgatcgcagcgcatcccttgcgacgctggcgttgcaacgggtcgaaggcgctgcctcgtcgcaatgatgcgggcttagctggagagagcacgagcgcgaccttcgtcgctccttcaaacgctctctccctcacggactgcgcccgaccgacaagacgacgacaaagacgcacgtgaagaggatgacgactgggacggctgtaaaacggtggacgacggggagggcgaggcgagagcgtcctgctgggcgtttgcttgcggagagaaatataaaagggggtggtcctcagcccctcgccgctcgctttctctctgtcccgacgagctcgttgcctctcgaccctgaggcctagcgtggcatgagagacgacgacgtcggccggccgaccacagacgttgacctccttcctcccatcatcagctgacgatcctcctttactttggctcgtcgcgccatcggcccgggcgtgagcgatgctaatccttgggcaggacgagatggtcacgcgcagggccagccagcagcagccgcaaccgtcctgacctccttcccccgccgtctgccgttttactccctcccgggcctccctttattcagatttcaatatgggccaaacgaatcgttcgttgtcgttccaacgtgccggcgccgacagggccgaagcctcgatggtcagacgagccaaggcgacgcgacggcgatttcacacccccctccggcgtcccaagctgctagcggccttcgcccaggcctcctgccccagcctgtcgcctttttcgaccctcacaagctgctagcggcgacttcggcgacggatccgatgcgacgccgcaggcgaggtacaaaaggcgacggctcggcgtccgagtctgctggctgctctttcctcgtcctcgtcctcccccgtcacgcccctctcccatggccctcaccctcctcgccctcacctcctcgctcgccggctcggcctacgccgccggtctgaccggcggtgaagactttgccttcacccgccagacctcgtcgtcgtcgctcgccgcccgggccaatacgcccacgttcggccagctcgtccaggacagcctctcgttctcgctcggccacggcgaggacggcaagcggttcatctcgcccgtcggcagccagttcaccgcccacacgctcccggcctcgtggggactcgagggccacgtcggccagacgctgcccgtcaccgtaatgacggtcgacggcaacgtgacgtgcgactctgtcggcggcctcgtcgccgacttcctcgcccgggacgacgtctttgacgaggtgcgttttctgatcgccccactgacctctgtaccgactgacttctgtgccgactgacctctgcccccctccctgcacagtccttcatgtcgaccgtcctgctccagtcgcacggcgccttccacgtcgacgcagaggtcgccgcctgcctccagagcaagtactcgaccaacctcctcatcaagagcggcgacgcgacctcgtccgtctccgacatcggcctcgcccacgtcgacggcgcctgggtcccaaacgggccctacatcgcgaccgtcggcgcctcggccgtcacgctgactgaggtcttccgcgtctaccgcgacgagtcgcaggcgttcacgaccggctcggtcaagacggtcgacgaccgctttgtcgcgctcaccggcaatttcccgggcatgaacaccgtctcgatcccggtgccctcgcggctctacgccgacgtcgccgacccccggccgctcgagggcgtccgcgtcgccgtcaaagacatctacgacatggctggtcttcggaccggctgcggcaaccaggcctacttcctcttctacccggagcgtgaggtcaactcgttccccgtccagcggctgctcgagcatggcgcggtcctcgtcggcaagacaaagacgtgtaagtttccgctgtcgccaccctcgtctctcaccttcgctgacatagcgtcgaccctctttcagcgagctttgccaacggcgagtctgctacggccgactttgtcagccagatgggaagcttcaacccgcgtggttcgtcttcgccagccttcgacgggcggttgctttcggagtctgacgaccgaccctttcccttgcttaacccctcaggcgacggctggcagatcacgtcctcctcgtcggtcggcgccggcgcggccattgcctcgtacgactggctcgacatcacgctcggcagcgacacaggcggctcggtccgcgggcccgccgctgtccagggcgtcatcggcctccggccctcgcacaatgccatccctctgacgaacgtcatgccgatggccgccgttctcgacacggccggctacctcgcccgtgatggcgatctaatggctcgattcggcaaggcttggtacggcgaccactttgagacctttagcagctggcccaaggtgcgtgcacccaggtctccttgcggcatgtctggcccctcactgaaccccttgccacagaccgtcgtcgcgcccgcctcgagctggacgtttgaggccagctcgctcgccgccccgatgctgaacgagttcaagagcgtccttacgaccttcctcaacgcttcgctgaccgaccagggtcacgtcgagctctggaacacgaccggcgccatcacgaccgagggcgccggcgcgacgctccccgactttatgtcgcgcgtctacgccgacctcatctgcttctgggagtggaccaacctcggcaagccctggtttgcagagtttggcgcggccaacgacggtcgcgagccggcgatcgcgcctgcgccccgcgtccgctgggactatggccggtacaacctgactgaggccgactacaccgaggccgtccggcgcaaggaggtcatgaagacgtttatggaggccgagatcctcaaggccgacgccgaatcgtgctcgtcgtcgatcctcatcacgccttggtcgatcggcgctacggactaccgcgtacgtcgcccgcccgcctctggccgtccgccgctcgctttctagctgacctggcttgatcccccgtgcaacagaacaactaccgctcgccggcgaccgtcccgatcggctacgactattcgtacgcctcggtctttaccgagacgcccgaagtcgtcatccccctcggtcaggtcgcgcacgagagcacggtctcgcgccataccgagtacctgcccgtcactgtcggcctcatggcccgcaccggctgcgactatgtcatcctcgatctcgtcaaggcgctccaggtacgtttgtgacgtcgctggcgttgtcaaaggctcgcctgctgacctcgccctcgctctcgtcgactctcctccaggacgccggcatcatcaaggaatacaaggtcggctcgagcatggtctgaaaaggacgcgctgttcaatggaattcgctgctgtgtacgagggggatgcccgatatgaatgcttaatcggcaggaccggccgacgtcgagaaccgcatttcaaggagagggaggggggccccggcagggtgggccgccagatttgggcgtacggcctgtttgagaacctctacggccgcgcgaccgatcacggggccgagatggccatcgtcattttcggaggttacatggtccagacgggggccatcacgctcggcaacctgacgtcgctcctcatctagtgcgtcctcctccccttctgtccgtttgtctctgacgctgatatcgttgacctcacccccgcccagccaatacatgcttgacgccgccctcaacggcgtcattggcttctggtcggcgatcaacaaaggccttggcgccggcgagcgcgtctttgagctcatcgaccgccagccccagatcgacccgcgcgccgggaaggcgctgtcgccgacccggacgggctcgctcgagctcaagaacgtctcgtttgcgtacccttcgaggccagagtcgccaatcttgcagaagctcaacttgacgatcgctcggggcgagtcggtcgccatctggtgcgcgcaaaagcttcacttgcccgtgtgtccctcgagagcctgtttcgctgactcgcagaccaattcgcgacggccctgcagtggcggctcgggctcgggcaagtcgtcggtccagaacctgatcctccgcttctttgagcccgacgccgggaccatcacctttgacggcgaggacatccgcgactttacgatggactcgtggcggtcggcgatcggcctcgtctcgcaggactcggtcgtcttcaccggcactgtgtgcgtgtcgcctcccttggtcgtttgacgtactttgctctaactttcggctacccttcacctcccctccgttagcttcgaaaacatcgcgtacggcaagccagacggcatcgcaactcccgaggaggtccaggcagcggcggccgaggccggctgcgacttcattcacacgctcgagcgcggctttgacaccgagattaccaagaactcgctcagcggcgggcagaagcagcggttcgtcccgtcccgttccccttgtgtctcgcagttcttctatactgatgcgtcgagctcgtcaaacgcttccaggctctcgatcgcccgagctcttgttcgcaagccgaggctcctgctgcttgacgaggccacctcggccctcgatgcccagtcggagcagcacgtgtgtccttctctttttcctcggccgtcgacgcggcacgcgacactgaccctcgccatcgccttccgctttcccaggtgaacgcggccatttccaaaatcctcgaaagcaaggagattacggtcatcctcgtcgcccaccggctgtcgagcatcgcccaggccgaccgggtcgtcttgatcgagcacggcgaggtcgtcgaggacggcaagtacgacgagctggtccgtcacgaaagagctgctcgacggcgagggttggttctttactgacgatccgccctcttgcttctcttcttgcgctgcccttgcccgctgcagtcaaccgatcgcgaatcgcgctttgcgcagctcatgtcggcccagctgctgatcgacgtcgacgagaccgactccgagtccaagttgacgaccgacaagggtgaggccccgtccaagccatccgccaaggccggcgaggcaccccacccggaggaaaagctcgtgcgctgagcgcgctcagtcgaggccggcgagaggagatgcggtctcgcaacttgagtctgcgagctcacttccgcaatcacgccgcttcgctctgttcttctcctgtcaccgcggccccaacccgcttacctcccggctccctattttagatccgccttctctagtctgcgccgtttgaggggccagagagggtctcggcccctcacctagaagtcccccactcatcacatctcttcgcaatccgtgttgtacgaccttgcactctgcatgtcccctgctctcccctcggccctgcgcagtctagaggtttgcgcgtattgacacagaacgtggacgtgtcaagatgagctgaagcaaagagccatcttgctgagagcaccaacacgagtcggtcagcgtcgatcgccacctggggaagaagggagaggtaggctgaccgggcgatcctgcaagagggaacccaacttattcagtccaagctggtgtcgagaagcacccgtgccagcactcacaggaacgagtcattccgggacggctggagagcagggtggagcgaaagctcgtcttcaaaacggaagagcaaagaggtcagcaagtaaattcactcagcgagaggtcgcgaaggacggacaaaggagcacagcctcgtcgtaccggggtggcttcgacccaaagcgagcgtcgcccagctgccagacgaccatctgacaagctttgcagcccggtaggctcagctggacggcccccgtcatgacgactgattcgtatccggtcagccaagcatcacccacgagcaggccgagcagaggcgtcgcaccgtcaaaggccgtctttatttcgcggcagagggtgcgcgcatcgggctccgttttgacgtggacgaggatcgagagcatagcgctgacgagaaggtcggtcgattgctgattcgccggggcagtcgggaaggcaagtacgacccgccggagcagatgctgcaagatatccgtcgtagctgatcggctgaggccgatgcgaggaagaggtcaggcagagcagacggtcgctgagcagacagccctgcggctcgcacctcagggcggtcttgccgtggatggccgtcttgacgacgcggtgaacgacagcctccgtcatctcgtcgccgtcaatgacagacgcaaaggctgggacgagcccaccttaatcagaaaggtggcacgagcgagtgacggaaagcagtcgaggtgtcgcacctctaacgatcttctcgtcgctcgcctttcgctgcagagcgcactgcagccagagccactgggcgcggcgaagatcgctcggcccatactgtcgcgggatcgggttgttgttagcccttcgaactctcagctgacacaagtgcgcgctgcgcacctctgccggaccgcttgcaatgatctcctcgagcgttgcctccgctcgctccaagtgcgaggcttcagtcgccgacgccgcgacaaaggccctcgctgaggagcgttcgggatcggtagcggcacgtgagtggccggcggcgaagtcgggagacggggagcaaggaaagtcagtggatgcaccggctcgctcgcaggctgttgcggggatgtgtcagacagcgcgctcgcaagggatctgaatgtgatgggtgtgctgataagatgcatccatacgagctctcgcgccctcgcaggcactcggcaagtggagtagcgagccaacgctcggtcggctggacgagagcaagagacggtcaacgaccgggaaggacgagtgacgacgattgcaggagcggaaaaaggagaggacggaccttcattaagatcatcgagcgcgttagactggtgttcggcaccgtcgaaccacccgtgcacgagcacgcgccttgcagcttgtcgcctcgtagcctgcccgcatgacatccttgaccacaaggcacccctccccgttctactctagggaaggaaagaggctagccgttccgcagtctgtgtactttgaccgcacgcgacttcgtcgccgcgagtggggtcggaagggcgcaaatggaaggagcgatagatggaaacgcccgaccccttggatggacgattcggcgttggctggcgctggtcgacccctcgttctccgcgaaagagaatgccgacggttgtccgaggtgcagagtctgccgtcgaggactaaccatggtccacctcatatcagccggcccgcttgaggacgccttcggcgacggcgacggcctcgcggaaagcctgccgctggctgaacagcgccggaagctcggccgcccagccggccgtcaggccttcgagcgttggaggtgaagcgcctgacgctgccggtgtcgtcgattggtcggaagggccgataccgtcgactgctgccgtcgccacttgaggcgggaacggcacgggcacggcgccaagcccatgccgggcgagcgagccaacatgagccagctgaagctggacgagcttgagcgcctcggtcctcgctttcggatcgtcctcacccgcactgtcgaccgaccggtcgagcgcgtcgtagaaggcctcggcgaggagagcgagctttgcgagctcgccgtcgaacgaacctgcgagctggcgcgtgagctcgaggtggccggcgagcgagctgctgccaatgtgggtcgagccagagacgaccgagggcgctggtccaccacctagacctgacggcatcgagcctgctggcccgagagaggcggtgatggaggaggacggcggccggagcgagccttgctgaatggccgacgccggctgaagatgtcgctgctgctgctgctgctggctgttgctcgctccgggtccgactggcggatacggcgatgtcggcagacgggacatgatgcggttcctaagacaaggacgcgtccgagtagggcaaaggtgcggtcggcaggtgggcagaaggttgtggtcgggagacaacgagccggagtcgaagtccaaggcgggacgaggcgacggctgcgcgggcgtcgtcgaccagtacgctcgccctcttctttcgtgccgcttgaaaactgcctcgacccctgcagagcagctgagtatctcgtgttctctctgcaggacatgagagatgatgagatggcttcagatatggcagtatcgcggctcacgtccctccaaggttgagaacgtggcccagtacggcccggtcgacctgatgaccctcgatccaccgcctgacctcgcccatctcgccccggttgccccgatggccgccgaacgagatgaggtcggtgatctcctgcatgccgctgaagagccggcgggggatcgaggcttcgcgatggcgctcggtgacctctaaaagggggggagaggagagctggagggtcaggatggaagcagcaagagaagatgccgtccaagggaaggtcgattcgatcggacgcactctctaaagaagcgaccggtcgggatgaggaaccagagcgagaggggggaggggacgcatcaatgatcagtaaaggggcctcattcgtggtccaggcagctcgacacgacgccctcgactgagaaagggcagcgacgagttaggagggacccactctggaaggatgggatgtcgctccagctgacagccttgatccagttcatgtagccgtcgacgtttcgctcggtgccctcgaggcagatgatgcccggcttgccggcgaggacaaagcccgtcaaactccagccaggggcggcctggacaatgtcgtttcgcttctcgcgcgtgctgagcgaaggcagccagtaccagacgcggtcgacgttggacggcggaccccagcgctcggcttcgggtgcagagtcggcttggcgggcgagccgttcagcttcgagcgcggtggcgtgcgaggcggcgagcgctaggaggtcagggacagcttgccggagatgatcgaccgagtcaaggacggcgtcgatgaagccttcgtggccgccgacggacgacgacgctgccggagcgaggccgtcgagcagctggcgaaactgggcgtgcgagagccatgtcggcggccggaggacgagcgtcggctccgacaggctgcagctcggcgcgagcgggaagatgaggtcgaggatgagcgatcggcgctcgtcgccgtcgagctcgagcgtcaggatcgccctgagttcagtgggcagggttccgggtgcggcgtcggcgagcggcaggtcgacgccttgagggaggacgagctcgggcggtggaaacatcgactcgagcacggcgagcgtgccatcaagctcgaccagcgaggaagcgccgtccatcgaatccgtcggctgcgagaggggaggttgctggtccaagagcgtccgagagagcagagcgagtgcagggagggccgaacgggccagcctggcgtgaggctcggtcgttccgggcttggttccgagcgccaggcttagcagggtgacgctgctcgcggtggtcgacctcctcctcctccgtccctccgaccgcatctctcgacctccttgcctcccctgtcagacagctcactactctctccggccacatctcccgaatcccttacagctcgcgacgatgtccctcactcagcgcatgacggccgccctctcgacggcccgccagacgttcccgccctcgccgcactggactgccgacgacatgccgcggctcgatggcctgacgaccgctgtcacaggaggttacgccggaatcgggcatgtctactgttactctctctctctctctctctcgcagcagtcgtgctgactcgctcgcttcttgcgcacaccagcgaggagacgtgcaaggccctgctcgagcacggcgcccacgtcgtcatcctcggccgctcgcgcgagaaggccgacgaggccatgcagcggctcgctccggccgtcgagaagggcggcaagcaagccaaggtcgagttcattgagtgcgacctgggcgatctgacttcggtccggaaggcggcagacgagctctggaacaatgtcgagaagctcgatgtcctctttgtgcgtccatccgggtttgccggccctgtgccttttgattcgctcacttacccctagccttctccgctttgaatcgctagaataacgccggcgtcatgttccctcccgccggctcgctctcggcccagtcgatcgacatgcagttcgcgacgaacgtcctcggccactttcacctgtcgaacctgctcgtcccgctcctctccaagtcgacccgcaaggccgacggcttcccccgggtcgtcaacacgtcgtcgtctggccactggctactggcgagcagcggcggcgtggtctttgactcgctcaaagtgcccgagggcaaggacaacactcttgacatctatcggctctacggccagtcgaagctcgtgcgtcccgcccgcgtggaaacagcctcttgtggaagctctccgactgacaacggcccctctcgccgatagggcaacgttctcttcgctaacgagtttcagcggcggcacccttcgatcgtcagcacgtgtgcgtcgtcgctgccagtaatttagcgaggacgcttccgaacctcggagctgagatcgcgatgtcctatctgccagccctcaaccccggcaacctcaagacctcactctcgcgccacacgcccgccctcaccaagcgcatcttcaacctgatgtgctacgacccgagttacggcgcgctcacccagctttgggcgggcacgtcagccgagggcaaggcgctcggcgggaagtatcttgggccttgggcgagggaggtcgagccgctcgctaccactcaggtccgcccgcctttcgcttccgtcctgtgacccgcgccgtctgtttgcgctgacgccctgcattgttgtcttccactttgctcctcaaggacaaggacctcgcccggcgcatgtggcagtggtgcgagaaggagtgcgagggcttctagagcgcctcgccggtccctgttcctttgcagcgtccttctgtcaagcggggcggctcatcatcttcccgcccgcttactgtctttctccttcacccctctgccggccctccaccgccggctttgtatcgtacgatcgagctcgctcccctcgctgtctcacacctttttgatctgaacagatcgggcaaaaataggaggcacggagtgctggcatgtgtccaacggcatgcgccccggccctcccgctcctcgagcaagagccgggcgattctcaccagacgtcggtcgtgagatcttcgcccagctcacgccctcggctcaggctcaggcgtcggtgttggcgtgaacgacctcgcccggttcttccgcggcggcgggatggcatcggctgctgccggcctgcggctttggtctgtcgaccgcgcgcgcgaagggggcgtctgcgagcgctcgtcacgcgtccgctgatggcgggctggtgctgacgagcgcgagcgcggctgacgaaagcgctcgtcgacgggcgagggcgagcgccgttgggcaggatcaggggaacgcgagggccagcgcaagcgacgaggaggcgacggccggtggtcgcgcaaccgctgctgcggctggtgccggtcgtcgcctcggtcgcctcggctgtagttggggatgtagacgtcgtcggcccgacggtaagagttgtccggtcgtcgccggcggtcagaccggtcgtcctggtagtacggcgcaggacgctcctcccgacggacaggcgaaggcgaccttccacggcgcggcggcggcgagcgcgtccggtcacgcgttgacggccggccagcatcgcgctcccgggtcgagcctagcggcggcgccggtccaggctggtcaaatcgcgaccctgcgcgggccccgtagcccgagtcgcgcgccggcatgccctcgggagccctcgctccaccccctcctccaccgcctcgagcaatgctcatgaagccgcttgcgacgctcggtccacccttcgcagtcgacgcggtccgcatcgcaccggacgagcggtacgagcccgccgcggccgcccgatcgcgctcgtcggcggccctcagctcggccttcttctgctcgacaaaagcgacggggacacctcctgggctctcggccgccgaaaggagaagcgtccagagctcgctgacgaatggcgcggtgtgggttgcgaggaagccgaggaggagggactgcattttgcgcgggtcgggcgagggctcggtgggatcttcgagcatccccatctacacgtgaggcgaggtaacggaggcgtcagctaatcacgcttcacgctggacagggcttagccagcgaagatgatcgagcgaggagacgcacaacaaactcgacgacgacctcgtcctcgaagccgagcagacgttccgtctccttgacgacccacggccggaagacggccgcattgaccttctttagattgaccttttggctaaagttgggcggaaaagtcgtcgaggcaaggaacttcttgtccttgttggaaaagcggcggtcgttctcgacctgtaaggagggacggacggagagcaggcagacaggcgggtgcaggcgggcgggcgcgaacaaggtaagagcgtcagtcctgttggcggtcagacggcaaccattttgccgtggagagcaagctcagccagctgaagaggactgaccattgtgctcgacatgatgggcagcgagatggaggcaagagagggcgatgaaggtaggagaggagagagcgagggtcgacctggccggcgcgtcactccgctcgaacgctcgattcgtgagattggtcagccgcatcacaagccagagtaatcgagcagccgccttcgcgtcgcaactcgcagtcgaccatctcccgaccttcatttcttccgccctcgatgctcctctcgacgctgcttgccctcgcgctcccactcgccgcctcggcgcggtccctcaagggctcgctcgcttacagctcgaccttcccggatcgctcggcctgcccgatcggtgcgcgcgccctcctcgacggcggcgagcgctcggccatcatccgcgccgacggcagcttcgtcctgtccgtccctcaggctgtccttccgctgggcgacaacagctccagtggctgtctgagactgacgcttcattctgatgcgataccccgcgtgcagcgaggacatcgctcccggcatgcacacgttagcgctcaactgcccggctttcaagttccatccggtgcgtcctcttcggttgatactcgagggggtctgctcaagcgctgagcgatcaaccaagggcatctcgcggctaggtgcagcatgactgatctgcggctctcgttcccgaccgaacagctactcgtcgccgtccctgtcgagcccagcgaacggcccttcgtcgccgtccacaacccctccaagctgccggccttctcgctcgcctcgctcccggacactcatctctcgctgccttacccgctgattctctcgcccgtcgcgagcgagcagttctttgagcctacacggggctttgacccgagctcgttcttgaagaacccgctactcctgatcggtgggctctcggccgtcctgatgctcgggctgccgtaccttaccgtacgtccctcggctctttcgcctcgctccttctgctacaaggaagtgagggaagatgtacgacctgtgctcatcctcgctgctccccgcgatgcttcccagagccagctcgacccagagctcatcaaagaagctcaggagatgattcagcccgcggcaggcaaggcgtctcctgcctggggctcgtcggtcggcagcagcagcggcggcggcaatggaggtgtgacggcagcggcggctgccgctggtgggccggcaaagcgcgccgccggcagaaaaagcaagcgctaaggagacggaagggggtcgctgcctcgcgccgctgttcagctcagggtccttaatgcgcccaagaatatcaaaatccgccctatccacacgtggccaaaagggggagagctgtctcgggctgatcgacgactgggcgaggtggtgtcgagaaggataacaaggggggcgcgtcgcgcggctaacgcggcaagcctgtgccagccccgtcgctgtcccgttcagctccggctccaaacatccggtcgggacctctgggggcttccctgccgcgactgacgctgtcgtccaaccgtgtgccggtttttgtccggagccgtcaggcctcataagaccgagcctaaccggaaagctgacttgacgactcacagcttctcactccaagtcctcgccctgccattgactcatttcctgtcgacatatctccatcgagcgttccctcgccccccgcaacttcttgagggcgatgcagaccccgatgtgtcggtccaccaatgtcgggcgtcgctctcgtttgattcacgcccctgaccgtcttctctccctgccctccgccatctcagatgctctcgtaggttaacctccacatttcgagcaggcgtcagtcctgtcaagatgcggggcctagaggactgactcgcccgtcctcgcctgtgtcgcctgcctgcatgcaggttgcgctcgtagtcattcttgcggtcggcgtggccctcttctccttttacagtcagtccattactcgcttctaatccgccctctgcccggcagggttgcggatcttgagctggcacgccctgcctctcagtccacgtggtctcggcccgactcgccgctcgctccgatgctggccgcctgcgtagcctagaagagggcaagcactcggacgactgtctgacttcggacccgccggttttctgggagatggccacagtgacaaatgatgtagtttggagcgtcccggtgagtcgctcgcaattccagtcgtcgactgccgctgcacgactccttgtactcatctagagtttgaccgactttcgtccggctcctgtaggcaacttctgtccccctctcgctcaccctctatccgaccccgccaccatccttggcgatcaaagcggagcgcgagattgtcaaccgcgcagaggcagcggccgctcaagtttgctttcttatcgctcaaccccaacccattctgctcggcggacggacagatggcacgggcgacgggtccgaagggggcgaaatcgatctcgggaccgctctcgtgtgggccgagagcgagacacatctcgacttgctgccttgacacaaggatggggcgatgtatatcatacgatcgttttcagcgctatccctcgctcagacccggagaaaggccgtgtcgatgccctgggagaaacgccagacgcagagtcggccgtcctggccgacactgacaatcttggcctcgtcggcggcgaggccgaggattcgttctgcggcgagagcgaggggcgaggcattgaggcgggtcagctccctgctcagggaagacggagttacgcgatagaaaggacgagcgactgtgaccgcctcggagatcgcgcacgagcgagcgcgaccggcgatcccagattttgacggtgatgtcgtacccggccgacacgacatagtccttcctgaattggatcgcacggacctgcgtcgacgtcgagacttcagttggcggggctcagtgagccggtcacgacacactcacgagatcggtgtggccctcgaccgttcctctgcaacggcacgcgcacgcaagagacgacgcatcgcccgagctgccgtgcgaacgtgcgcacggcgcgcgatcgtatgtccggcccaggccatgctgagggtctagcaggtcgacgtggcggacatgcgagtcggacgagccagaaaggacgaagcggccgtcaaagtcgagcgagctgatgcccctcgcctgctgcggaagggtgcttagcagctcgcctgtttcggccgcccagagccggatcgtccggtcgcccgaggcagagacgatgacgccgtcgcggacgcagacggcgttgacggcgcctctgtgcccggcgaggacgagccgttgctcgagcgaggctgcgttaaacaccttgaccagtcggtctgtcattcgtgaggccggcggcagtcagcaccttttccagcgaaggcggccaccagccaacgcacctttggaacagctgacgaccatgcctcggtcggcccggacgcagaagacgctctcgtcatgagcttggaccgaggcgacccgctgcgcagaccactgctgacctcgaggacggctcagctgccagagtacgagccgcccatcggacccgccgctgacaaggcggaaggtgtcgccgtcattgcctccgctgtcggccggtgttgatgcggccagcacgcacagcgtcaagacggagccgacgtgtccgccctgaagaacgcaaacgaccctctcggcgccctcggtcaggtcccacaaccggacggtcaggtctttgccaccggtgagcgccaaaccgccaagcagcgcgacgcagtatatgctgccctggtggccgggcaagccgccggccgctagcgacgagtttgaagagagaggcgagcacgaaagatgatggtcgggagaggcaaggcgccggcggagtatacgcgaggcgaggtagaggtgcttgtagttgggtgaggcgaggtgaggttcggtcacaggcgcggccgatgggatgggagatgcgaccgctgtcggaggtggggtcggtggtggccgagaggggcggaaagacgacgatatgtctggctgcgatgatgtggcgttggctggcagggcttgaaggaggtgccgaagggtcgcgatgccagggttgtgcgcttgtgggctggatctcgggccattcggtggccaagcgccttcgaacgaggtgacagcagcagcagcagcagcgggtgacgtcgccgcagcaaacgcagcgacccagggtaagggcgattctcgcgtcccttcgtcgacatctatcaggccggcgctgcttgacgatgcccagggaacgctgcttggtcgcggcaagcaggccgctgagcgggcctcgaacgacccgcgcgggagtgacgtgtggaaggcaacgttctcgcgtaggcagaggtttcgccagagggcttgacaaggcagaggatgagtgcgtcagagcatgcgctgcctgcggaacgactcggtcagctctgggcacaccttgatcgtctgcgagtagccgccatgaccgactgacggcctgcgcgacgagcagatccgagctgtccatatgcgacataacgaggagcgctagctcggaaggcagacgctgagatgtcggtggaagagtcagcttctgagtacgggccgcaagcgaagcctgcagactcagggaccgggaccaactctgagcaggtcgaacgacagccttgagtcgatgtaggcctggacgttcttgagctcgtcggctggaagtgtcgccaggagcctcagagcgagatctgacaggcagtccagctgtacgttagtcgtctgccatgcttcaggttggcaagacgtcgggtctgacgcacctcgcacggccaagcccgacggcggtgcaggctccatgctcgccccggccccgggctgagacggcacctgaggctgatggcctcctccaggcagcttggagaggatcatggcgggcccacgcgccgtgttgagaatgaggctgggtccgtgtgtctcgtcggtcgggtcgctgtcgggcaagcgaacagctggtccagacgctcgcgcgtcgacgtgtgcgcgcgtcagtggcaaggcaggccgcaacacctcgccaaaaggccttcagcaaagcgggcctgacctcacgggcgtgctggtctcggacagatgcatggcaggccacctcgggaggctgctcgtttttgcgtcgttcctcgagaggctgcatggactgctggtcgcgattacgacgtcgttacgtaaagttgggcgcaccggccgagccgacgagcacgagcctggctccgcctgctgctgctgctgctgcaaccgacgacgccctatctgccatcgccctcctcctccgcacccacccacgacagaccatccctctgccagccgctcccttccctgcctgacgctcctgctctaatagatagtctcccgctcccggcccggccatggcctcccctcgcccgtcgtcctcggccctcccgcccgcctcgtcgacaccgacgccctccaagccacgccggccatcagcctcggcccactcgtcagcagcgacctcggctcgctcgcgcttccgctcgtcgtcgacctcgaccccggcaccaggcgggacgtcgtcctcgtccgcgacgactggtgccgactaccaccagcacggcgcccagtcggccgagcccgtctcgcacgaggccggcctggcatcgatccggacgtttttgaaaggccggtcgagctacgacgtctttcccgtcagcttcaggttgatcgtgctcgatactaagctcatggtcaagaaggcgctcggcgtcatgtggcagaacggtgcgtcgtcccgcctcactccttgacacggcccgggtccggccgctgagctccggccaacggctcggtcccgagctggcgacaggggatcagatgtgagcctgcttggttgatgcaggtcaacgctccttcccgctcctttgcaggcatcatctcggcgccgctgtggaactcggagacgtcgcgcttcgacggtgcgctccgagcaggccgctgacacctcgtttccttgtcctcagcccactgacgtccttgcgttgactccttcaggtatgctcaccgtctcggacatcatccacctcatccagtactactaccacacgcagacgtacgagggcgcggcaagcgacgtcgagggctttcggctcgagaacctgcgaggtacgtcgagccgctcttcagctcacctatccgcccgcgcaagcgctgaagcccgctctcccccttctttccgtatcatcagcgatcgaacgcgagctgcacgttcccccaccgcctttactctcggtccatccgctcgttccgcttttcgaggcctcgcagctgctgcagacgacgcatgcccgtcggctgccgctgatcgacgtcgacgagcaaaccggtggcgacgtcgtcctctcggtcctgacgcagtaccgcgtgctcaagtttatcgctgtcaacgtgcgttctgtctcacttgatggaacctgtctagcttgatggctggctgacactcaagctcgccatcaccccctctgcggcctctagtgcccgattacacattctctcacccaccccttgcgagccctcgacatcggctcatatgtcgcgccagaccacctccgaccgcgagggcctatctcgccccactggccgctggcgacggcaacgcttgacacgaccgtctttgacgtcgtacacatgttctctgagcgtggcatcagcgccgtgccgatcgtcgacggcgagggccgggttgtcaacctctacgagacggtcgatgtcatcgtgcgtatacccttcagatgtgtcccctcttcaagttgacgctgatggccgtctcgccctttcgacagacgctcgttcgcctcggtgcctacacctcgctcgacctgacgatcgcccaggcgctcgcacgacggtcgccagacttccccggcgtcgtcacatgcacgccccaggattcgctcgcgaacctatttcagctgatccgcaagcggcggctgcatcggctcgtcgtcgtcgccgggaacaacgacccggagggcaagaagaagggcacgctcgtcggcatcatctcgctcagcgacgtcatgcggtacattatcctcggcggcggggctgaggacgagggtcggggcggcaaactcgacgttgtcggcgagggccacacgccagacgagggcacgacaccgccgggtggcggaggcagctcgacagccggagctgggacgccaggcggcgagctcatcgaggtcagcacgacgccgacggcgccgccgccgctgccgttaccgctggtgccgtgaggcatctctcatgcgcccccttttgaactttgtgcgcggagagcgagaacaagcatcccatcgcgagccctcgctcgcttcaagttccgccgaccctcgtcagcgctctcccgttccgccgggaccagccgcaacccgagcgagtagggcgctgtagcgctgccgcagctggggagagggagcagacgagtcagcgagccagcagcgctccgaggtgaggagacgcaccttctgtgccttagcctcgccccaggacgcaaaggggaggagcgcgactgccgcctcgaaccactgcttggcccgcgcctcgttggccgtcacgctgtccttctggccttcggtcgcgcagatggcgatgagctggggggcaagcaaggatgtcggtcaacgtggtcatcgtcgccgagcgaggctggctctcgggccgcacccagtccgcttcgtcctgagggtaggccatcgcttcggacgagacatgcgcgcgcatgacgtcgattgcctcgttcacgtgctcgagagctttgacggcggacgacggcgcgccgttggcaagcagcagtgtgacgctggccctgatccatcgggccaggcgctcgatggacggcacgagatcgaggtcaagagcagcgttgagcagcgtctgatgagaagaggagagagaggaggggttagagggagtgatcgagagtcagcgacagcgacgaagctctgagaaaccgctggttccgatcctcacgtcaaggatattcgtcgcaactgaggcggcaagagcaaggtcgtctgatgagtagaggatgcggctgtagggcgcgaagctcaccttcgtccgggattgcaggatgcgtgaagacaaggtgcgcaaagacctcgaagagctgctcatcgcagacgcgcccgagtctgacagcctccttgatggcgtcctcgaccgcggcccaagcaccaatatcgaggagacagctgacctgagaaaaacgaggctcgtcagcgcttcggctttctctgccgacgcagcgacgaagaggttcacctgtagcgcacgaaccgtctgactggtctcgaggaggatggacgtgctcggccccggcgggtcgaggtcaagcaacggactgaggaccgcaaagaagatgtcgcaccgtccaaggagtgtgctgttgaggcgcgactgacgaggagcggattgtcagtggtgacttggaggcgtcttttggcgaagggcgcgggactcactcgctcggcctcgtccgacttgaccgccagctcgacgtagcgcgcgacgcaagacgcataggccgcgagcacccgatggatacgcatgtcgtctggctcagcgagttttgtcgtctcgagcaggtccatgaactgctggcgcctgtcagccgcgtcaagggtggcagagagctggcgctgcgacgtaccgagagtgcgatctcaaagaggccatagacggccggctctggccaagcgttgcgtgtgccgtcgacagccgagttgtaagattgcttgtagagccagagacactccttctggaacttgtcgcccttgctgaggccggccgccctgctcgagagaagctcctgggcggagctaaagtggcgcacaagaccggccgcgagctcgtcggtttccctgacccgggcgtcgatgagcaaacggtcagctgcagcctccatggtcaattaagcgcgccaatgagacggcggactgttcgctgttggcgccgtcgaggagcttaaggtcgagtcgaacggtgcaccgcgtgaggacaagggccgagatgggcgagagatcgatgactccgcctttgactttcgtcagcagagcgtcgagcacggcggccagaacgccggtcagattggcgtcggtcgcaagctggctgtgagggattgcaatgaaggatgagcgtcagctcgtgatcctgcgcgagatggagagaaagacacgcgttgcgaggagtaacagcctgccgtcgaagtcgacgcaggcggtgaggctttggacggcggcgatggctggttcctcgaggcctgtgagtcaatgagagcttcagctggagcacaagaagaatgacacgagggaggcagcgcagactcgtaccttgctggacggcactaaagactctgaggtagcaggttgaggcctcagtcgggtcgcaccgcgcgagactctcttcggcctgggcgtagtcctgcgtgaggatgaagcagagagccatcttgctgagagcaccaacacgagtcggtcagcgtcgatcgccacctggggaagaagggagaggtaggctgaccgggcgatcctgcaagagggaacccaacttattcagtccaagctggtgtcgagaagcacccgtgccagcactcacaggaacgagtcattccgggacggctggagagcagggtggagcgaaagctcgtcttcaaaacggaagagcaaagaggtcagcaagtaaattcactcagcgagaggtcgcgaaggacggacaaaggagcacagcctcgtcgtaccggggtggcttcgacccaaagcgagcgtcgcccagctgccagacgaccatctgacaagctttgcagcccggtaggctcagctggacggcccccttcatgacgactgattcgtatccggtcagccaagcatcacccacgagcaggccgagcagaggcgtcgcaccgtgaaaggccgtctttatttcgcggcagagggtgcgcgcatcgggctccgttttgacgtggacgaggatcgagagcatagcgctgacgagaaggtcggtcgattgctgattcgccggggcagtcgggaaggcaagtacgacccgccggagcagatgctgcaagatatccgtcgtagctgatcggctgaggccgatgcgaggaagaggtcaggcagagcagacggtcgctgagcagacagccctgcggctcgcacctcagggcggtcttgccgtggatggccgtcttgacgacgcggtgaacgacagcctccgtcatctcgtcgccgtcaatgacagacgcaaaggctgggacgagcccaccttaatcagaaaggtggcacgagcgagtgacggaaagcagtcgaggtgtcgcacctctaacgatcttctcgtcgctcgcctttcgctgcagagcgcactgcagccagagccactgggcgcggcgaagatcgctcggcccatactgtcgcgggatcgggttgttgttagcccttcgaactctcagctgacacaagtgcgcgctgcgcacctctgccggaccgcttgcaatgatctcctcgagcgttgcctccgctcgctccaagtgcgaggcttcagtcgccgacgccgcgacaaaggccctcgctgaggagcgttcgggatcggcagcgggtcagtttaatcggcggccaggaggcgacgtcctgccaagctcaccgagcgccatcatgacatccttctgagagacaggtgcagcatcaagaaagtggctgagcgacaggcccagcaggatgacgcaccttggcgagtcgcgaagcaggttccgcttgctgatcgctctcgcgctctgctcgctcgccgatgcggagaccgaacgtcagccagtcgatagcgagactggctcgattcgcgatttcgccgtcgtgcgacgcatcgtctggtgctttgggattgacgagcagcgatcggccgacttcgagcgagaaggttatcagaggcacgcgctgagaagatgaggaagatgcagcaccaggtcagcagtctcgtcatatgccctggcaaaagtctggggcaacgcacgtcgctcgacgagagaagagagagccggccgtcatcgcatgcctgccgcatcatgtagagcgccgggtccatcatcttgcggaggaacatctgttcgttgggttgcaagccgtcagcgagcctctcgcttgcgaggagggcaagtctcacgttttcggcccggacgcggaagtaagtcgtctgagcgcgggccttttgcgcctgctcggtcgtcgaggccgaggcaggcatcttcgcaagagcctcttcgttctgcagcaatgaaagaaggcggttagcagacgtcgcgacctgaaatttgtaatggggtcgactggtctacggacgctggcggccttcatcagcagagcttcggcatcccggccctctccgatcgacgagagcgcagaggccgccttggatccgagctcgagaagccggacgaggtctgaagcaggggccagcgcagagtcaggatcgcgcgcatacacccctgtgcctgaccgtctgccgcgtcctcgcaccttcgatcccgaggacctgctcccggccgcagtcgatcagcgcgtacgccgccgctctcgctgtcgacaaaagtagcagtgctagcgtcggcgttcagttgctccagggctggcggtgcgacaacccgcgagaccagacgcaccgcgcgcaaagagcatcatcaggccgcgctccctcagctcggctccccggttccagagagcgactccctccgcgtcgagctcgtcctgatctccactttggagcgtttcgcggccgtcagcgagaagggtagataggtccgaggcagcgttggtgagcgtgtggaggtgggcgaggatggtcgccggggtcgagcccggtgccggcgcagacgacggctgggcagcaagcgaggcgccatgaagcagaggcttcagctggagcaggacctctgcggcagcgagcaaggtccgtcaacggcgaagcagttggatgggcgacggcgcgggcgaagcgggctcgctgctccgcagggttcccgagcaggctagggaagacgcaccacgtattgcccgcaggctggtgccgacgtcggccgccttgcgcttcctagcgctggacatcttgttgctgtcggatgcggatggaggtgagggccggcttgtcgttgttgagagctctcggctggaagggtggtcagcgtcggaggcgacggtcagtgctgcggacggccctgcatcccaattttggtctgccctctcagtgcgtgcctcccgtcgcccaacggatcaagtgagtagaccggcatcatagctcatccctcgaacgagcgtcgtcgactgctgagctggcgtccgactcgccgaggctcccgccgccctcttgaacgacttctgtcagcgccgacccgcctgttgctaccggcgctgccgcctcgagcgcgtccgccagtcttgttggaggccggccgctttctttccctgcgagcccggcgatgtcgctcgcctggctgaggaccaccgacgatgcggtagcctgacccttcctcgctttgccggctagtcggccggcaccaaagacaacggtggcgagtccgccgaccgccctgtcgaagacgcgacgcttgaggatccagccgcacgtgcagaggaagaaggcgacgccggcgagaatgcagattcggtcccagtagtttgtccgctcgagcgcgcggatgaggtgcgacgactgatcgagcagcgacgagtacttgacgtagagcgagttggtcgacttgatcgtctgggccgactcgtctgtaggatcggggagagtgtcagcgcgcacacgagagcaggacacgacgggccgatcgagctcacccaggagctgcgaagccatgacggacgagtcgagctcggcccgcatgagctcagtcgtcttgcgcagggcgagcgtcacctggctcgctttctcctgcaacgggtcgtccgttgtcctgtgcacagacgtcagagcgcagacaatggtcagcgctgcgtccatcttaccgatgctgatgacctttcgttgacgcacgagtgagatgcgtccgggatgagtgctgctcgcctgttgataggtgttgcaagtgcgtcagcgaaggccgagtgagctcgggacaagggcctcgagcgcgaacgtactgcgccccgaccaggtcggcagacttggcagactccatgagcgaccgccggtactcgccccttgcgctgcataatcgagcacaggaacactctgatcagtgactcatcgaagagcacgaggagagcacagaggtgggacgcacgcggcgacgtcggctgccagcatctcaacccgagcgagcagcgtcgagcgggccgacgcgtcatcctggtcctcggcaaggtctcgaagctcctacgacaggcgaatgagcgagagagtgatcagcagcagccagaacatgtacaatctagcagacacgaccctcaaggtacgtaccaggaccgcccgttcgagaccgacgagatccgctcgagcctcgcgggctcgagcgtcgagctcctccggcgcgagacccaacgatctgtcgcccagtgcgagcgagggaaggatgtcggagcggagataggccaagcggcggttagactgctcgagcagctgctgggacgtgaccatcttcggctgctgttcagggagagaggccgtcgcagagatcgatgtggttcggagcgagcgaagccgaagtcgtgcggcgggctgacgccgggagatgatccgccagcttgccctctagctctcaccctcaatccctgcactctttttacgcaagtgtgccttgaatccatcctctcgctcctataccccagccctcctccatcctcaagcgttccagatgtcgttgccggccccgcctccgccggcgagcttgccgcccgcggtcgtcccgctcgcggccgcgccgtcaaagcaggtcgcccagacggccctctcgacgctcctcctgtcgcttccgctgccgctgctcgcttcgacgcgtgtcgcctcggcccggaggcgagagaaggagcgtctgatggaggaggaagggctgttaccggaggagcttcgcgatggctcacctgccataggctcgaccgttgccccgggcgaggacgccgagaggacggccgtcaagctcgagctagagagcatgggcttccgagtcggcggcgacctggcagaaaggtgcgttcttcgccgcactacaggtagctctgatgtactttgtctgcgagaggactgaaacgagcgtcccgccgactgtcgtctcaggctcgcgttcaccaagccgcgctttgccgactcgctcgagattgtcaagttcatttgcaaagatctctggtcggcggcgttcaacaagcaaattgacaacctgcggacgaatcaccgggtacgtctggccggagcggactgaaggagcaacatggcggtctcctggcgcccgctccgcagcagtacgcacgcctctcgctgctgacttgtcgagccttgcgctgttctttgggccctgccagggcgtctttgtcctgcaggacgccgtctttccaccgatagcgcacatctcaacgacacatggcggaccgaccgacgtccagctcgccaccctggtgcgtgccgcctgctagctcacaaccgaccaaagaagctgacgaactcttgcctctcgtgcttcagtacctcgccttcgtatgttgatgtctgatgaaaccctttttcagcggcatttcctgttaactgactagcttgtacgctcagccccgcggcctgattcgaggcgccctcggccgactcggcctgccatgtaccgtcacggccgactcgtctggcctcccacagggtgcgcagactcgccctcatctttgaagcgataggctgtcgaggctaataagctggatacggccatctcgcacacggccagtgactttccagatcaagacgtccaagataggcccttagagcgtcatcctctgaccacgaccagggccctctccggcgtttccgctcggccatgtgggtcgacggctgttggcactgcaagccggcgcagcttgcccgtctcgcgccggtgcaggatgatcggcctcgccgcctgcgaatcggcccgacgctgccttctggactccgcgattcttcagcagcctcagcgttgccgattcatggcccttcctcgcgaccggccacccctgctctcgctcgctctttcgacattgtcagagaagcatcaacatcatcaccgcccctgcagcacccagcgcccgccggtccagacctccttgcgcttgagtacgctgagctcgatgcccttggcagcagcgccctgggagccgtcgatgctggcaaagtggaagcgcgggatgacgaacgactcgcgcgtctcaccctccatggagccgacgagcttggatgcgctcgcgagacccttggtcttgggcgtctcgagcggcttggagaacgagatgaactggggcggcgcgagcgagggcagccaggccgggttgatcttcgtcacacctgcggccgggcaagtcagggcgtggcgggaaggtcagtgcgctgttttcgatcctataagagggttgagagacgcactcttcatccagacctggcttgtccggacgatgtcaccccagacgagccactcgggcggctcgctgtgaaacatgaccgagctcgggtggataaagacgtcctcgtcgacgcccatcgcccgatagggcacgccccgggtcgaggtaaacttggcgccagcagccttggaggccgggtcgagcaggtctttgcggacagcgagctggtcgatgaaggctgaggccatcagctgccgaaggaccttgagctgcgtcgtgttcggcggctcgagcttcggattgaagagagggccagcggcggccttcggggccggcgcaacgacgccccgcctgctcggtttggcgggtgcgggcgggttgacaggagcgaggttggccgaggcaatgttggagatctgggcccgcagcttgtggatctcttgcatcgcctggtgatgggagcgatgcgagtcagaagacgcgcacaccacgagggcccccgtctgagctgccgacgtaccttgggccggacgtagttgcgtgcgcagaagcgctcgcccgttccatcgtactcgtaagctccgacgacggcgagcatgcgaaagacgtcgctcgcgccgttgccgagcgcgttgtaaatctgcagaagaagcgacaattcgcggtcaggaaggtggccaggacaaaggaagaggagagcccacgcacggcttgcgactggaagaaagccttgcgcttctgccgcaactcctccttctggcgaagctcagcgctccggatgtggctgatctcggatcgccggtcgccaagaaagtcgtcggcgtccaggtcctcgtccgcctctgcgccaagcgcctcctcgcgcaggaacgggtcgccgaccgcgaggacggcgacagttgcaatgacgtacggcaggcagccgtgctgctgccctgagacgagcatcttggcaaaccggggtgcaaccgggaaggtcgacattgcccggccgagggcggtgatcttgccgccagcggtgccttgccggccggtcgtcgttttgaccgtcgcgcccgcctcgagcgcgccaaggagggtgagcaccttctcggccttggccaggctggcgcgatccggcggcgttggaaagggaaagttgacgacagcgtcgatgttcatcgacttcatctggaggacaatgccctcaatcggcatccggaggatctcgggctcggcaaacttttcaaagtagttctcgaagacgggcgacgagtagagccggtagcagtgaccgggcccggtccggccagcccggcccgcgcgctgcgaagccgatgccttgctgacccaggagacgcggaacgactgaacgcccgagaccgggtcgaagtgacgctgcagagaggaatcggtcgtcagcggagggcctgaggctagtcgatgcagagacaaggaccgacctccttggcacgaccgcagtcgatgacgtagcggatgccggggatggtcaacgacgtctcggcgacattggtggcgatgacaacgagccgcgagccctcgggaggcgcctcgaacaccttcagctgcttgtcgctgggcaagagcgagtagagtggcagaatgtgcatcgggcctggacaggtcgagggcgagcagaacttgtcagacatggggcgcacgagtttcctgttggtttcgaggcacgtaccctcggcgtcggcctcgtttatgatgatctcgtcgtcgtcgtccgagtcgctgtcgagcgcctctggatccgagtcggcaccgtcgtcgacgtccgcagcaaggcggtcctgaatctcgccgagctcgagatcctcgatttcgacgtcagctacggcggggaaagggttttagaccgtgtcagcggccggtacctcgcccagtcaatgaccgacgatggcgcgcaccatcctgcggggcgatcttcatgtcgcccttcttctcgtcggcctcgtcgacctcacgctccttgcccttgcccttgtcggttcgcggggcgaaaccgccggtgttccggccgcgctggcgctggcgctcctcccaggctttgcgtccgaaacgcttctcgagcttcttgacgaggctgacaatctcgccctggccagtcagaaagatgaggacgccgccgggtgggaggcgggtatggatctttgacgccttgttgaaggcctcggtcggatagtcggcctgcgtcttacggttgaagtggacggtgaccgggtgctgacgcgtcgggatcgtgattgttggcggcggcgtcgaaaagagacgggtgttgtgcgtaaagtcggtcgtccgcaacgtcgctgacatgataatcagacgcagcggctgaaagacggcacggcggggcagagacgtcagtcggtgcaaggcggatgctttggctcgacagcgaggctcaccttgacgccgttcttgccctcgcgccagaggttctcgcgcagcttgacgacgcgactaaggacaccgacgaggacgtccgtgttgacgccccgctcgtgcgcctcgtcgacacagacgaccgagtatttgttgagaagaaagtcgcgggcgagctcgcgcaggagcacaccgtccgtcatgaacttgatgctcgtctgcgccgaggtcgttgcatcgtaccggatctggtacgagacgcgcgacgacggcaggttgagctcctgcgcgacgcgaagcgaggtcgacatggcagcgactcgtcgaggctgggtgacggcgatcatgcccgggttgtctgtcagagcgcgccacgagtgaattcgtcagccgtctgtcctcggggggacgatctcaaagttgataaagagacgcacccgatccgggcgagccaaagccggcctcaaagaggaactgggggacctgggtggtctttccgctaccggtctctccacagaggacgatgactgggttgaggaggattgcctccataatctgctgctcctcggcgacgaccgggagattcatgcgcgcctcctgtatcttggggtcacggtggaccttgatgtggttgcgcgggttggcggcgttggcggcaacagcgccagtcggcgacggcttgagcaacgaagacgccggcaggacaagctcctcgccgagaggaccgacacgaccctgggcaagctcagcctccctcttgcgctgcttctcggccttgagtgcctcgagcttgaggttgggcccggcgtgcacctccgccgccgtggatgccgaggtcgatgtctcggcattggccgaagcggcggtcgcacccggtgcggctgactggttgtaggtcgtcgacatctgctggagcgcccagtgcttgaagcctccggacctcttgggccgcggcgtggcgtcctcctcctcttcctccatgtcgtcctcatcgccctcgtccgacatgccatcgctgcccatgtcaatttccgagtcgtcatcgtcgtcgtcgtcgtcttctgaatcgtcgtcgtcatcctcggggttgacaccgaagccgtcggagaaggatgggattttgagctgcggtaattgaccgtcggcatccttgccctcgtcctcggtgtccatgtctgagttggacgagtcaaagttgtcgtcctcgtcctcgctgaggcccgcgccgcccttggcctttacgccccaggacgcgaacgtgccctagaggagagtgagcgcatcacatgaggatcagcacgctgcggcattcacccgccttgacgagcagacgcaccgtcggtcccttgatcttccgcttgacgacgaccggcgccaaagggttgccgtccgcatccttggcgagcgcgccaccaatgacgaccggtgttttcgcgtcgatgacggtcgcccctgaccaggacggcttgccggccgacgtacctggcttcgcctcatcctccttctcctcctgcacaggagccggacgtggcttgatcggcccacccttgccagcctcccagtcctcctcactgttgccctcatcgctgaccgaaacctcgtcgcccgccccgcgtcgacgcttcagcgctcgtcggacagtcttgtcctcgagcttggcagccttgtcggcatggctctggagctgccgggagccgagcgtcgaggccgacgctagcgagggcaggagccccgacggcagctcggcctgcatgtcctgcagacgctgaaacatctcctggcgcgactccttcttgagcttcttgtcctgtagcaagcaaccaggcgtgccagccggcgacggtcgtgttagcgcagcattcgcagctttaaggccgatagcgggatgcaagcacgtacgatgtagccctcgagtcgcttccgcttcttggtcgacatctttccctccttgccttcgaggagctgccgatcaccagcagaggcgagcacgaggagacggcacggtcagcggagaggatcaggcgcgacacgagaccctgagggcgctctcaggagcaactcggcgagagctaggcgaaagccggcagtccaacgcacctcggcccgcatgcgctccttgcgatcacgctccttgtcctcggcagtcttgcgggcgacgatgtcgagcgagctctcgccgacggtagctccagcctcgtcctcctcttcgacgacgggcgtggccgagcccgctccggcctcgacccgtgggcccttgccgcgcttcttgtgggacgagccgccggcgaccgacttgcgagcggccgagttgtagcggacgcgttgcggaggaggcatcctgctgacgtcaagatggccaggcaggggagagggtgggagacgagtcgctggtcggaggcagggaggccaagccggccgggcgaaattcgaagcggctcgcgacgaggcaatttcctgctgcgcgcgcgctgctgcgttgaagctgctgctcgtgcaccgacgagcgagctagaggtgcgcgagcgaaagatcagaaattagaattgcaagcggaagggacctaggagggaaggaagctacactgggaaaaaatagaggggacagagttcgtggggtcatcagggcgagaccggcggcagccggtgcgcgcgcacgattgctgggcgcgcggctcgccagccgtgccgaggcatatgcgaagaggggcagggacgaaggaaggatttttctatgtgacaacatgcgaggagtgtatgggtgcaagaggaaggagagggaagagagacgagagtcctctaaggggggccggttggtgggcaagaagggatgaccagatgtggctgggaggggtgggggagggccgatggctggagatggtccgtgagagctcgagcaagactgtatgcagagtaaagaacggacgaggagggatcggatgacttgggcgaatgagcgtgcgctgcggccgccgccgatcagcggacgttggatgattgccgtgtgcgggtacccgactgggtcggctgggcttgcgagtagccgcgagcgtgctgctgctggtgctgctggtactgctgctgcggatacaggttgagctgcgagtaggagggcgagacgtgggcgaaccctgggccaaagggctgatggtagagcgacggcgtcgagccaaagtccatcgggtgtggctgggcgtacaggccggggccggggccatagggcatgagatgggggaccaacggaaagactactggcatgggcggcgagtagtagtcaccgaggtggccgacggtgggaatcgccggcgaggagcgcgagtgcgacatctggcgcgccggccgaggctcctgccgggcggtcgttgccgttgttgacacggacggcgcaaacgtcgcgaccgaggcagcagacttgagctggtgcgacgaccgcgagcggatcgaggccgagcttggtgaatcctctgttgtcggagggggggccatagtcgatcgccgtttggcactcgtcgacagaggagccgggccggtcgacgagagcgacgtctgcggcgacgagtcgcccgagtcgtggatgagcgacggcggctggagttcgggcaggtgactgccgcgatgactcgagggcgcgcggtcgtgcgacggggagcagtcgtgcgagtgaggcgccgtctcgccgaggaactggcgcgagtgccgcgaccggggtccgaatgtcgcatgctgctgcggctgcgatgggtggccggaggcggcgctagcacccgggccctgagacggggccggggctggcgggagggcgaggtcgcgcatgctggccttgctcgggatcgccattggcgccccggcgcgccggccaaggctgtcccagtcctcgaaccggccgccgttacccttgcgctggccgccaaccttggcgttctcgcgccgctctcgcgtggccgcaatttcggctcggaagcgctcctccctcttgcgatcgacctcttcctggcgctggcgctccttctcggccttgacttcggccgccaggcgcacgtcggtcgcccggacgagcgcatccgtgtcggccgagaagcgaacgccgcggggcgcacgggccgggctgattgccttgggcgcctcggtggtcggcgtcgtggatgacgctctggcagaggtcaggaaggcgaaagactgccgacgagcgacggccgagagcgggacgatgtcttcgtcctcttcgttgtcttcaagtgcggatgacgaggaggccgtcggcacctcgatgtgcatgtcaaggccggaaaacgaggccgacctccgagtgatcgttttgtcccgtttaagaccgccggggatcgacagcgccggacgcgctggctgaacgttggcgatggctgttgcccggaccggcggcggaggcgatgacggctccagcttgatggacggcagcggcagggtggaagcccggacgggcataggcagagcgcgcgccggcggggtcgcactcgcggcgagcgttgacgcgggcagcgccggaggcgcgtcgacgatcaaaggctcggtccgctccttgaccatgtcggtcggactggtccggccggacgagagtgtcgggagcagggtcgtcgtcgcgctgggtgatttggacgcgagcgtccggaaaacctggccgctctcgacctcggccgcgagactcgtcaaggcgaccgagaagcgaagcgccgagccgactgactgttgccctacaggagccttgcctcggcggacacggacgacgtcgcagctgaaggtccggtcaggtacctgcggatgcggcaggatttcggtgtaacgctgctgaaaggccgggcgccggacaaaggcgaggatgcccgatccaagctgacctgctttcgcggccttggctgaaggcatggtcggcgcaaatgcgtcgacgaggctggcatcgagattggatggatcggagatggtggcgacgaagcgaccgttcttgtcccggatgagggcgatcggccggacggcaaagagtctggcgaacagcggttgtgggtcagcaaggctatcgaaagttggctaggtggagcttcctcaccggatgagtgcctcgacctcctctgcgctagcgaccattccctcttcgagcttgcgcatgacggtccggatgccggcctcggctgcgagcccgaggtagcgctgctgattgcgccgcgtgagcgggttggtgctcgcagggaagcgccgtccaggcccttgtccgccgggggcagtcgatagcggccgctgggcgatccccgtgagcgccgcgcgcgagaggaagagcggatgcggcgaaggccggaacatgatgctgagcttctgggcgctgagcaggtgaagcgactgcagaggtgagagtgacggcggcgtccggaccatctgcggcagcgccgacgacgacgatgtgcgcgaacgcgacattgccgggactgccgccatcgatgctggcgcctgagcctcggacggcatagagaagaaagtggtcggcgtgacggagggccgagtcgaggtcgctggtgggagcgagagaccaagcgtgccggtccgctgcgagaggttgtcgaccggtgttgtcggcgacgatgcctcagagtcggtcgacgaagggcggccctgctgaccgaccggctgaagggcgagctccttcttctttcccttggctgcgcttgttgatccgcctgcaccgcccccgaaccagcccttgatgacgcctccgaacgagcttttcttgcgctcgagcttgtgcggcagcaagggcggcagcgacagcggcgagggcgccttgaggtcaaattcgtcggagccgaggcttgaggtccgcggcgtcgcgatcgcggtcgacgacgacgaggccgatgagatcgactgcgcgtcggcccgccgcgaacggtcggatgccgacgagtcggaggagtgcgacgaggaggtacgcgtcgaggtctgcgggtcaggataggcagggagtgagtcctagaccgagattgaaggctggcacggcaagaagcacgcacctctacccgatgcggattgccactgtcgttgtcttcgtcgtcgtcgtcgtcgtcgtcgccgaccgtccgtaaaggcggtcgtgagctgctctcgcgcgaccggatggtcgcaccgagccaggaccgccgggcgttcggccctccgccgcccaccttgttcggccgcagatgtgaggtctgagcctctgcaaaggacgagtgaggagcgtatagaggcgaggccggcgccgagtgcgattgctgcttcgacgcggagaccgccggcgggtgaagggacggcggcgcaggccgaggcgcggtcattgttgcggtcggcatgaggctcgcaggagtagccgatcaggggctgaagcttgcgcagcgagaagagggcgctgctgaagaagtgaggtcggagtcggagctcgtcagctcgatcctgcccgagcgaggcgacgagcgcgcagtgacggtcgtgcgcggccgcttttgccaagctgcctgatgaagccggcggcagcgggagaagagctccaaagcgactcacatcggcggtccctcgtcgagacgatgggtgacgacctgacggcgaccgagcgtcgcgatgtagcgaaaagggctgggcacaggctgaggccgggggccgcactactggaggagaaggaggccgcgcgcggggaccgaggctcgatggcggagagcagggaagctgaggggaggcgaagctggcggtttaaaggtggagcgcaactggacgagaaaagatgaggcgcgctcggccgacggctggcgaaggggctgcgcctgcctgcgacaggggggtcggtcgagtgtgaagagggatgtgaagggcggggtcggtccagcgatgtcgcgcgcgggtcggaagctgagcgcttgggctgagagggcgagccttcaactgcaggcacgacggcaccgaattagctcctgagctcgcgggtcacacctgagcgagacgcgagcaaaggcgacaggagaggagctggctggctgaaaaggcggactcacacgttgcccgaagaagaaacgaaagggtcggggtcggcgcggtgtctcgggtcgccgacggaagcactgataggcggaacgcgaggtcctcaaacggaaggcgagctcgagcgacgaagggtcgcaaggcggcgggccgggcgcgagagcgagctgaggctggacggtggtggtcgaggagtgagaggaaaagcggctcgaggtagatgcgggtgtatcgggcagcgtcgatgcctctcgtgtggggaaggagagggcgcaaggtgaccgacgggccggtgcagcgtctgcttcaacgtcaagggagacgggctcggacgagagctggatgtcgttggggagatgggacgccagagaaggtcgtctctgctgctcgccgtgctcgatctcgcccgtgcttgttcggaaggggacgcgggacggacgaggtcgtcgtcgtttcgtgggccgaagctgagactgcgctgcgcagcgcgacgcgtccgctgttgaaggcaaaagtccccgtttcaacaagatttcctcccggtcggctcgcatacgctcggccagctgtcgctcgggtactggcagtccttcaagtgagatgtcgtcctaggttgcccagcaagaggcgaggtgagccgagagaggaaggggctgcatgcccggccggcggccgcttgcctcggcgaggcgatcggattgaccagcgctgttgacccgcggccaacaggatcaacaggccgggacgacgacgtcaacggcgtcgtgctttgcctttgacaggcgctgaaaagactgtcgcagcagagcgtgagagaggtcgcctgcgctacgtctcgaggcccgcctctgtcgtagtatagagctatatatcattgacggccagcggctgattctcgtcggctcggaagcaccctcgtccctctcatgctcctttcggcgcagcacaagtgcttgccctgcgtttggtcagcctcggacccccctcgcgtggcggcggcccacgagcttggcagggcagattgcacctgccgatgccgagccgcccgagcccatctcttgacgcaaagacatgactatcggccgatgaacgcttgctcatacaaccgcatgcagccctgcaacctcgcgcttgacgcggtggaagaggttgccgactccgttcgactcgacctcgacctggcctttgtcgagcttcctgacggcaacgacctcgccggcctcgtcggagaccgacgacgtgcaaacgaggacaccctcgcctgcgaactcggcccggacgccaagcgcctggagccggcctttcagcgccgtcagacggaggtcgccgatgtagagcgagggcggcgcggtcgggagcgtgagcgagggcgacggcgtcgtcgagaagggcgagagcgacgatggcggaaggagcgagagcgactcgagcactggaatcgtcgtgttggacggaaaggtgtagcggccggtgatctgcgcaacctcgtagtcttcgaactgcacaggcgaaaggagaggaagatggcatgacggggttagcgcttgtgctagaggtccctgagtcgtctggacgaaccttggccatcttgagcgtgctcatgagcatgtcgctcagactgagcgcgtgcgacgtcatgttctcgccgatctgaaccgtctcgcgctcgcccgggctgtagacctcgttcgtcatggttggcaaagccttgcagaccgaaatcagctcgtccgtggcgggtgccgtgccgtggacgaggatctgtttgcgaggttgaccctgtcagcatcggactaaagtactcgcgcgcctgaggactgaccaagcgccgcgggttgacctgcgggacgatcgtcttgaccgcccggccgtcgttcaggccttccatgtcaatgtagtagaggccgcagcgcatatggacggcgtgcgtgtccgagacgaactttgacggaggctcgaccggctcctcgcgctgcataggcgcggtcgtcaacgccagatccgaggtaggcgactcggtcgcgtcagacggaccttcttctgctcttcctcgatccgccgccgcttggcctccttgacaaactcgtcctcgccaacctcctcaatctccttgccctttcggagccagacaccgacgtcgaccgcctcgccgtaggagtcgacgttgcgcgcccgcttctcgacaaacggaaacatgcggaagcggggtgcgccgccagaagccgacttgaaaaaggacgtcgcccgcgttgcctggcctttgacgtagatgtcaaacgacagctggcgcgagtcgtcggcccagccgccgccgtcgtcgatccgctggcgtcggccaacgccgataaccgcatcgtcgtcctcgtcgtcctcgtcgtcctcgtcatcgttctcgagcccggcgtcaacctcgtcatcgtcgtcgtcgtccgactcgacctcgtcggcctcgagcagctgctgggtccgtgcgagcgccgccttctgagaagcctccttctcgcgctcgatccgtcgagcctcgttaaagtcaatgagctcctggcctgagagaggcaccttgtggttgatctgttgcgcgaaaccgagggtgagcaatgcgttagcctcggcaagcagcgcagagacgatctcgcggcgacaacgcaccttgatctcgaacttgtcgttcatttcaagcggccgaccagcggatccctcgcccgccttctgaccggtgctctggcgggcgttccaggcctggaagaggtcgtgactgagcgtcccaggtttgccgcgctcggtcaggacgatgagcgtgtggtcgttcgaggcgagctgggtaaagagcgtgcgtgagggcccgtgtgaaagcgatggcgggatcgcgaggatgagctttggtcgcgaagcagggtatgtcgccgtgagggcggcgaccgagtcgtagaagcgcaggtgcctgtggacgaacggcggcgtcagaggcatggaagaggggaagaggcctagagacgcaccggaactcgagcgggtgccctcgcatctcgttgccattccggcgctggttgtagtccatgctcgtctcgccctcggcaacagccccgcccatccactccatcagactgcgcgcaaagtcgaccatctgctttgccgtctttgagacgatgcagagcgggaagatccagttgcggccctgggcatgagcctgtgcgatcgagtaggaccagtgctggtcgaggaggatcaggagctccatcaagcgcgtcgaggcatcaaccgggaacaggagagacgactgcgattggagcgtggccgtgatgagctctgaagtgaaggtagagggccacgaaggggtcagcccaagaatgaagagagcgttggacgataaggcgcacgaaggagggcgccgtctcgttctctccgcttgacgtttttccactggacgcgatccgtgtcggtgatgaggaggtcgggccggccgagcccctcgtgaattccctggcccttctcctggaggagcgccgtgccgtcaagatggcgctcgcgggtgtgattgaggccgacggcgtggaggatggtaccggctgagggcgagcggatcttccagattgtgccgccgagcgtgtgaccggccgagaaggcggtgatggtcaaggacgagagagcgcctttcacaccgatcgagacgtcagctttagattgtttctgcaggcgacgctcagctgaccatggccaagaagagaagggacgcacccatcagtcgagttggcgactcgtacttgacgcgcgagacggcgtcaaacgcctcgccaacctcgtcggccgtcgcgacccatttgacccgacgcgttttgactgcccgcgcctctgcccgctctgccaggtcaggctcggccaaacccgtcatctctgcgccgtcatctctggacgcaagctcggccgcttcgtcctcgacctcccactcgccgccgtcgagctcggcccgccacgtctcagcctcctcgagacaggcgacgcggcccatcgaggcaatggggaccgtcgcatagatgggacacgtcaggccgagctgggcccgggcgaatggcaggtagccgaggtgagggagcgacgaatgcgtgagcaggacgaggttgactgttggcgcgtgtctgccgagtgggcaagagcgagctttccgtcagcgtcacgcggccgcagctcaacgtggaattctgacaaggacgtactctcgcaggagccgctcgtactcgccctccatcggacgctcggcctcaagggctgcgagcaggtctgggctgccgcagtcgatcaggatcttgatgtcgtcgagctggagcaggtaggccagcggcggcagctcgcctgcggacgagctcggactccgggctgaggaagagagcggcgtgaaggtgatcatggccggcgagaggcagctaatgctacggactgggctgctgacgcaacgacgggtcgaccgggacgacgagcggagggagcaggctgctcagccgcggagggggccgactgaggagtttgagccgcaaccgggaggaccgtcgacacgctgagcgggcagagaagcgttcctactggatggacggacaggcagcgaaagcgagcgaccgtatcgtctaggcttgaggtagggctggagctgatggttgccgacgagacggaatgaggccgacccgaggtgtcgctgccagctcgccgtggccgtaaccctaggggccgcgagcgccctttcgccgccccgaagggatccgtgccgaagctgaccccaaccaccgacctcttttcccaccaccctcttccctcctcctcttttctcgcggcaatggacatccccaacgacaagtctcaacagtcggccgcgccgacgccgatgaactcgctcgccaacggcggcctcgtcaacccgggcacgtcggtcgccccgcgcgtcgccacgctcggcgaggaggacgagagcggcgccaacccggcgtcgatgctgtcgcgcgtgagttcccttctatctcttcagcctgagtgcgcgagaacgccagcgtgaggcggttgtcgccgagcgagagaagatggacggccctgttgggcatctggttgagcaggagcagagccagcctgcaaggagcccatcgcgaagcggcgcaagcgcgtcgtttctttcgcccaacagcgtgcggcccgggcggcaccttccttcctccccagcccgtgttgccggccgagtgggatgcagaaggcgcaactcagggctagcggctgcagtctccactgcttctcggcctttgcctgcagcgtgctctttcatcgcatctctgcccactagctcgtgttgctgccccatccggggctaagctccaggctgacctctcggctccttctcgccccctttctcctctttctccacttcgaccgtgtgccgattgccacccagaaccccaacttcctctctctgctcgcccagaaccagcagggtgccgacgctagctcgctccctccggcgatccgcaagcgcgtccagggcctccagggcgtccaggctgagcacgctaagattgagagcgagttccagctcgagattctcgcgctcgagaagaaggtcagcccggttgagatgagctcccgttccgcctatgatcaggcggctgaccttttatgaacgcaccctgcccgcagttcgcggttcgctacgcgcccctttaccagcggcggtctgacattgtcgccggtgtctctgagccgaccgaggccgagctctcggctggcgctgacgaggacgacgacgaggagaccgatgccaacgctgtcgcctcaaccgaggaggacaagggcatcccggacttctggctcatcgctctccggaaccacgttggcatcagcgagctcagtgcgtccctgattgcttcgcttttttaaaatagcctaggcgctccttctcgacttcccgagcctacttgctgacagtcgttcctcctgccagtcactgaggatgacgaggacgcgctccaccacctacgcgacatccagctctcgtacctcgaggccaccaagcccggcttcaagctgaccttcgtctttgacacgaacgactactttgagaacacgaagctcgagaaggtctactactaccaggaggaggtcggctacggcggcgacctcgtctatgaccgggctgagggcaccgagattgtctggaaggaggacaaggacctgacgcgcaaggtcgagatcaagaagcagcgcaacaagagtgcgtttgaggagggtccgccagcacacgggctgccatagctgatccgcttctgcccctcttgcagcgaccaaccgcactcgtgtcgtcaaggtcgtcaagccttccgactctttcttcaacttctttaagccgcccaccccgccttccgctgagcagctcgagactggcgacgtcgacgaggccgagcttcaggagctcgacgagcggctcgagctcgactaccagattggcgaggacctcaaggagcgcatcgtgagtctgccgtgctacgctttgccgcaactcattgggctcgcctgaccaatgccaaccgatctttagatcccgcgggccgtcgactactacagcggcaaggcgctcgagtacgagggcatcgacgacgagtcggacgacgagttcgacgaggacgaggacgcctacggcaccgacgacgaggacgacgacgcgccccgccagcagccggcgccgggctcgcaggaccctcaggagtgtcggtcccttctctcaccctcgccgcgtgcaacctgcccagactgacgcctgcttcacttgttcttacaggcaagcagcagtgatcgtggcagcttccagggcctcgcttccgactcctcgcccgcatatgcccccatccggtcagcggtcggcccggcccattcgtgcagaatctctttcctgctctttccctttgccttcttctcggtcctgccgtcttcccaccctttacccctaatggacacacagaccccctctcccctcaaaatctcccatcgccttggctttaagtcgcgcgtcgcctttccggctggatttgcatggaggccaccagccgttcgtacacaggaaaggcatgggtagagcgaggagacggcgaaagggagccggccccggcttgatgggtgcaggtcgagttcgagcgaaagcagtagcacgaaggccctcgccctcgggccgtctctttgaacaacgaggcgcccacccgagtcaaaatctcaagcgacgccactcgggggcaggtagggctcgttcgtctagatgcgaggcgggcaagatctgcactggcggcggaaggcgatagtggatggcactgcaggcttttcaagcggccgaactgcgaagcagagatgacgaggcatgtcagcaggcagcgaaggcaaacgcagcagtctcgacaggcaatgacagacctgctgctgtcagtagcggcggccttgctagccttctcggcgagccgggcctcaaatttggcgaactcgtcgagcgcgacgacctcctcgtcgtcaaggatctgcgtcggtgtaaagaagcgcacaggtcgtcagtgccggctttacgtgccaatcggccgcaatatgagcgcgcacctgctcgactgtcgtcacttcgggcacgtagtgcatgagcatgcgctcgatgccgctcttgagcgtcacctcgctcgacgagcagccgcggcagctgcccttgagcttgacgcggacgacgcccgtctcctcgtcaaagcccttgaactcaagatcgccgccgtcctccatgatcgagggccggatgcgcgtcgcaatcagctctttgacggtcgcaacaacctccgagtcggtgtcgaggatgcgcgtgtcctcgggctcgccgtcctcgccgacgccaggctgctgctggtccttgaagagcggcgcgcccgaggaaaagtgctccatgacgagcgaaaagacttcaggcttgatgacggcccaaggcgtgtcgtcgtccttctggacgctgacaaagtcgggcccgtagaagactgaggcaacgccctggatgcccatcagcttgagcgcgagcgggctcgcgagcgccgccttgaggttgagaaactcgtgcgtgccgcccgatgagaggacgggcgtgcccggaatgaattggagcgagttcggattcggcgtcgtctgcgtctggacgaagagcgtccggcgggctggacaagggtacagcaggtggcggcaacggcggcggcaggagtgtcatcaggaggcgagcaaggctcggtcagcaacgtctttcgatagcgacttctctttgacccgacatctacaccggcacctcgactcatgccgcgacggtgcgacgtcgcaaggcctagacagagggtacgcacagctcggtgcaggcaggaagggcgactgggccgaccggcgcgacgacgaggtggaggtgccgccggcgaggggcgagcgcgagccgaacgcccggccagcaagggcaagcgttaccacaggagtcaagcgcgaggacgaggcgcggagagctgtccgtgcgagcgaggacgacatggcgagaggaggaggtggtggtggtaagcaggtcgagtcggacgccgttcgggccggcactggttggctggtttcggccgacgagtcgaggcttcgccactttccgctgccgcctcggccctccgacagcgacgacgacccagcctccctctcctcccaaacagcagcagccatgtctgctcttctccgtgcgcgtgcggcagcgcgctcgttcgctacggcgaccccggcaccggccctcgctcagaaggactgcgtgcgttctggcctctcgccgacgggagctccctccgaaaggcgccatccctctcagcccgcgcgacccttactgactcgccgctggggattgacacagcggagtattacgccgccctactcgaagctgctccggacacttgagacggtccggtctaagctgcctcagggccagaagttgacgctcgccgagaagatcctttactcgcacctgcacgacgccgagggttcgcccgcgcccgtccggggcgagacgtacctcaagtgcgtcccaattcgatatctactgggctcgtctggaggcgccctgcacaggaccttcagctgcgagcgaggcgcttgactcgagctcggcgggaagcgggaagacatgtcgagtcgacccgggctgactggctgcgccctggccctcctccccttgcaccgcccccttttaggctgtcgcccgaccgggtcgccatgcaggatgcttctgcccagatggccctcctccagttcatgacgtgtggcatggccaagacggccgtcccagcttcgatccactgcgaccacctcatccaggcctttgagggcgccgacagcgacctcaaggtacgtctgctgccgtcgataagccaggcccgccagtcgctgactgtcctcgacctgaatcgcagaggtccatcgtctctgagaaggaggtatttaaattcctcgagtcggccgccaagaagtacggcatcgaggtcagtcaagcgagcttccgtcgtgcgtcgcttcgcaataagtcgctaactctatggcaccgctgcgacgacatcagttctggagccctggatcgggtatcatccaccagattgtcctcgagaactacgctgcgtgcgttgctctcgtcctgtgaccagctcttggtggccacagctgaccctaggcgttctaatccttctccgtcgacgctcacagccccggtcttctcatgctcggaaccgactcgcacacgcccaatgccggtggcctcggcatgcttgccatcggcgtcggtggcgctgacgccgtcgacgctctgaccgacacgccctgggagctcaaggcgcccaacgtcgtcggtgtcaagctgacgggtgagctcagcggatgggcgacgcccaaggaccttatcctcaacctcgctggccggctcaccgtccgggtacgtctctggtttctatccatctttaccaaggcggagtgactgatgcttcctctccttttgctacgcacccgtccagggcggaaccggccggatcatcgagtactttggccctggtgtggcggctcagtcatgcactggcctggccacgatcgccaacatgggcgctgaggttggcgcaacgacgtcgacgttcccttactcggccaatatgcgcgactaccttcacgcgactggccgccggggcgtcgccgaggcggccgaccaggctgccaagcagggcttccttgccgccgacgagggcgcgcaatacgacgaggtcattgcaattgtgcggctctctctactcttcttcacgagccgggcaaaccagctgactgtcatgcaccgccttctcccgcgcagaacctgtcggagctcgagccccacctgaacgggcccttcacgcccgacctgtcgacgccgctgtccaagtttggcagcttcatcttggagtcgggctggtcatcggagctcagtgctggcctcattggctcgtgcacaaactcgtcgtacgaggacatgagccgggtcgcctcgatcgcaagccaggcacgggccgctgggctgacgaccaaggtgcccttcatggtcaccccgggctccgagctcatccgggcgacgatcgagcgggatggcctccaggagacgctcgagggcgtcggcgcgaccgtcctcgcgaacgcttgcgggccatgcatcggccagtggaagcggaccgagaagcagggcgaggagaacgccatcctgacgtcgttcaaccgcaacttcaaggcccggaacgacggcaacctcaagacgatgaacttcctcgcgagcccagagattgtcaccgcgatggcttttgccggcgacctctcattcaatccgatgaccgactcgctcaccggcgccgatggcaagcccttcaagtttgatgcgccgtcgggcgccaagctccccgccgccggcttcacgcccggcaacctcgcctttggcccgacgccgtcgcccgagcccgtgcccgagaccgagattgcgatcaaccctgcgtcgtcccggctcgaggtcctcgcgccgttcccgtccttcttcgccaacggcccggctgagctgccgaccatgaagtgcctgatgcgcgttcgtggcaagtggtgcgtccttcaactgccgatctacgctcgtcgacgtaccctcaactgactctgcctcctgcctcatgactatttgcctctgcgcgcttgtgctctagcacgactgaccacatctcggccgccggcccgtggctcaagtacaagggtcacctgtccaatatttccgagaacctgctgatcaccgccgttaacgacgagggtggcgaggtcaacgtcgccgtcgactcggacggccaggacacgattccaaacatcgccaagcggtacaaggcaaaggaccagccttggatgctcgtcgtcgacgacgtgcgtgtctttcgtttcttcgcgaggccttcagtccggctgacttcctcgtttggaccctgtgcgctctgcagaactacggtgagggctcggctcgcgagcatgctgcccttcagccgcgtttctacggtggaagcatgatcgtcgctcgctcgtttgcccgtatccacgagaccaacctcaagaagcagggcgtcctcccgtgcggaccttctctcttctcgccagtcgtgtaccacggctgatcctgccctcgtccttgctctccgctgcgcaggctctggtttgccgacaaggccgactatgccaagatctccgcgggcgacgttgtcgagacggtcggcgttgccagcctccttgagggcgactacagctcgccgatcgtactacgcgtgaccaagccggacggctcggtcgtcgaggtcccgaccaagcacacgatgtcggtcgaccaggtcggctggctcaaggccggctcggccctgaacctcgtccgcgagaagaaggcggctgccgccgaggcgcaggcatgaggcagagatcgaatgacggatagaaaagacgttggaagaaaggccagtcttgtcgcagaattttttctctggttgacttcgaaaggtgcggttgacttagcagcgtcgccccgaggaagctgtgtgctcgtatcctcgctctgcatactcaagaaggccgcgggagtgggcaggaggtagggtatcaagcaggtggggcgtcgacaggaagagatacagtaaggtccgatataacttgatgcaggacggcaggagagcttgagggccgcaaggaacgaccctcagagcgcactcggccgcggacttcgagatcccgagccgcaggccagacggcggacgatcgccgtgtcgccgtgatgaggaggccgagtcaatgcatcagggcgatccgccggcccatcgcggattgagagtcgaggcgggcgccaggatacggcgggagagggccgctcagctcgcatcaggggcgccatgttgccgagaggatgtagctggcgggccgggaagctaatcagaggactgaatcgtaggagactaggagagtgagacgacgcaccctttgtcgatcagcacgcctcgggccttgtgcaggaccgtgtactgcgggcccggagggggttaaatcagtcagatcgggctgcggctgacaaacaaagctgaagcagacagaccttgagcgtccagtccagcgccggcttgctggcggttgggagggccagtgtcgtctcgtacggctcgaagatagagggcaaagatgcaagctcgatgggctctgtgtcaagcaatcgcacggaggaaagcggcacagccgtcagacgcccgactctcacggcctcagagagcagataccacgcacctgatggatccgagttgctgacgagccgaacgccctcctggcgggcaaagtccgagaaggcctgcgggatgtggcagcagtcgcggaggttgagctggttgacgaccggtcgccggtcgttcgggccgaggcgggcgaggaaacgagcgagcagcggctgcgagaacgaggtcagaccgaacgaagcttgggcgagtgcgggcaacgatggcagtgcctggcagacggtcaagaggagcagcggaagtcagtcccggtgagtcgagacgcatcgccctgacgggcatgggactgacctgccacagcgcgaccatcgcgttgagcgcctcgtcgctcagattgtcggcaccggccgcgcccgaggcaccgatgagctgttccggccgcttgttagtgaagaagccgagctcctctccttcgtacgcgacgccgccccaagcgagaataagcgtgtcgacgtggtcgacgccttggccgagcagcttcgccagctctacgagagcggcttcaacggcgctggatccgtctgccccactggacgaggccgccgacgacgacgacgtcgacgacgctggcgaggggagaaagagcttggccgtcgcgtcgagctctggccgagtcgtcgtcgttgacggcgccagcagcctcagctcggccgcctcgcgtgcgatgacctcctcagcggggacacggagaacgaccgcatccttctggctgccggtgctggccgtattcctggtgtaggacggcggtgcaggctcttggccatgcgtctctgccgcaccggccaaggccgaggcgagcgcctggcgtacagcgagggcgccctcggctgccgaacgcgtcggcgcgagcaggtgggccgaaggtgcgaagacgcggaccgagattggggcggcaggtgctggagcgctcatcttggcgagctcagaagaaggaggggcaggcggttggaaggggaagagagcttctgggccaggcggcaagcgatcgcggacgaccgacgcgcaaggcaagctggcgtgctgacgaacccctcgggccggagctccactttcagggggcggacgcagaaaagggcattcggaacgacgaatgcgaggtcaaagcagcccagcgttgcctgactcagagagctggacgagtacatgatatcgagacgagcgcgccctccttcttgtttctgacgccgtctgcgcgaattgcttgcgggtcagccgccagagccaggaggcaaggacagcgccgcgcacctctgtgcgattcccgaatgtaagcaaagccttgcgcgagtgcagtcggcctgctcggcaaaactggatacgagcgacatctggctgcgtagaggacgtctacgagcgagggatctgatgccgtctgaggcctgatttgcctctgacgcgcttcgtctcccgaccaagctgggcatggagggaaacaagccgctccgggagtgacggggtagcggtgatgaaggcgacggcgcgtagccgtatgctgattgcaagagggcgaggcttgggagtcgctgctttaacccggcattcagcccttctggtcgccggcgaaacggctctcggcagcctcctcccatgcccgcaggtcaaaggagcctgcgccggacggctgatcgtcgaccggccggaggacgatggcccgcaggacgcggtcaggcgtgatgctgagtgagtcggagaggccgagcgggaggtcgaccggcacctcaggcaacgtctggcagggagggagaggcgggcaatgaaacgtgagccgcagtacagggacaagctgctggccgtcggcgagatcgaggtacgaacggcaatctcgtcgagctcaccgagagccatccagcagctgcctttgccctcgcgagcgaggacacccgcaagcccgttgccgtcaccggcctggcagacgccaatgtcgacccaaatggcagcaggcgaggtacgaatcccctggccgccgacaaggagaagccagcccgtcgttgggttgacggcgagcaggcgcccggcgagccggaccttgggcgccggcgtcggagcgaggaggaagaggcgcgcgatcggcacgagccggcctggtccaggcttgttggcggttgactcgatgaacggccgcgctgttgccatcctgccgagcggtcgttactgccgagagtgagttgggtgagcccgcaagtgctgctcgagagggggggggggcaacgacgacgacacgacaggacgcggaagcggcggcccgccagcgcgcgcagtcggcattggttttgccccgcgcgccggcgcttcgagggcgttgagcgacccttccctcctcctttcgagttcttcaccttcacgccctgacccggtcactcccttttctttccttggtcctcctgttttcttcttgatctgccgccagcctcgtacgtcatcgtccgctcttgagcgtctgaaggctccgtcgcgctgcctctcgcaagacagaagtcgctgactccttcgctacgctgcgtgaccgacccctccctttccgcctcgtccagcagcccctcttcagcctctgcccctgcttgccccctggccgctcctgtcgcttcgctcgcagctcggcgctcgattcagcctcatgtcggccatcgtgtcctcggtggcagtcagctcaacgacgccgacctcggccgccggtcccgccgccgtcgtcgtcgcctcctcttccgctccggccggcccgaccggcttcagcaccgtcatcgttccctctagcagcagcgcagccccgtcttcgtccgtagtggtctcgtctgtggtcgcaagctcgtcagactcctcggcctcgagcttgggcgcgcctgccccggtcgctgtctcagctgcggccgcctcggccatcccgtcctccaactcgtctgcgacgacaggcacgacggcgacggctgcttcgtcgaccatgtcggccggcacgattggtgggatcatcggtggtgtcgtcggcggcctcgccctgatcaccctcgccgtcttcctctggaagaagtggcggtcccgggccgagcgggaacgttaccctctcccgtgcgtgcccaagctgccgagacggccgtctgtctccggtggtagatggactggcctgactcatcttctccgccctacaggccgccaaggtcgctcatgtcgcatcgcccgtcgtcggtccccggctcagccatgctcggcaacgagcctcggcgaatgtcttcaggcaaccgtgcgtctccgccagaggcggccggaaccggtcccgctgtctggcttcctcgttctgaccgcttgcactgccgttcccgactcgtctcttcagtgctcatggcatcaagcgcgagtcgccagtcgttcgtccagccctcgtcgtcgggcttccccagccgccgagagtctacctactcgacgctcgcccctcctcggccgtactactcgggtccctcaggcagcgtctcaggctcgcagtctccgcttggccctaccccagacagctcggaagccgcctcccgcacttcgatcgatctctctgcctcgtcgtcagcagggccctcagccggccagtcgccagagctttccgtcgccgatggctggctggcgaccaacatcgacctgccaggcctgcccccggttgccggctcttcgaacgacacgggccggtcatctccgtcggcgtcatcctcggctggccacggcgccgagagcggctcgagctcgtcccggtcgtcgtcctcagcggcagcagtggccgcagctgccggcctgccggtccctccaacaccgatgtcgccggtcggcggccagcctcgacaccaactccggatcagcacgtcctcccttggcccatcgcatcagcagtaccgccgcgagccctcgacggcgcgctactcgatctcgtccctctcttcagcccgctcgttcggccagggcggctcgctcccgtcggccggcggcgcaaaggcatcgggcacgccgcacggaggtcgccgcgtcgaactgacgatgccaacacccctaggaccgtccgacgaatggggcatgcccgacagccgacagtactcgccggcgacgccggccggtgggcggtactcgcagcgcggatcgacgacgccgagggtaggcgccgagacttcgacgaggtcggacgagcacgatcgcctccagtaggcagactcgtcgcccgagacccgtcgtacccgccgtccatcttgcctcacgcggttcctcgacaaccgccgaacgtcccatctttttgtaacaacaaacgcgcctttcgcggcctactgtagtctactcctgcccgatctgcactgacaccgcgcccacacaacagactgcatcctctcccactagattacgccctcaggcaccaaccgccctcttgcacccccgttgcctgcgtcccctcgctcttttttcgccttttctcgcttcacagcccctccttctgctcacacacgccgtccaggcatacacgtatgcactttcctccgacatctgcgcgcgtctgtgggcaaattgagagttgagcacggccctgtcggcgtacgcaggagtggcttggggtgtgacgtcgcagcagcatgcaactaatcgtgctctgtcactatctatgtctctgcaccgctcatatttaggagctgccggatcaaagacttcaggagcagccctcctcccccagccgaagacgaggagcggcggcggcgctgcgctgcgccggacctgccgaccatcacctgccttcggaccatcttgcacccttctcctttcctccatctcgtcttacgatgtctactgcagaggagatcaagggtatgtctttcgcttcttttagctggccgaggtcggtcggatgcctgattgccgtaaactccgtctgcttctcaaaggcgccaagcggcagctggcgatcaagacgggcgtcctgaagcggtgcgtgaccgtggcccttggcatctcgcctctgccagctggccaagctaatcgagctcctcccgtgctactagactgtctgcagaggtcaagtcgtacgtcaaggaggccgacgagcagcgggcgactgctcagcgtctcgccgggaaggagggcgccgaccagtgggacgtccagaatgccgttcgtcgacgtcgactccatcgtctccaactgcgggccgcaagctgacctgtgacgtctgacgcgccgcttcctggtcccgtgcagaacaaggtcctggccgactgcgagcagatgatcgagccgtcgaggcaccgggcccgcgaggcgcggcaccagctgagcgacctcctagtgcgttggcctgcccaagcccgctttcgccgccgtctctcccttcaaggcgctaacgttatgcgctcggctcatcccacatgcaggctgtctcccagtcggagcccgagctgctcggatcggacgagtacaagagggcgcaggaaatgctggccgcccgagactcgctctgagcctcgggcccgcacgtctgccgacgagccgactgtcgagcccggctgcccagcctcaactctcgcccttgacccctcttgaccggcaagccgccgctggaccgcaaccgcctgcgccctctcaggagcacgactcttaatgaatgcccttgctacgataggctggcccgagcctcgactcacccgcgcgacctgcgcaggccggcgccgcgaccctagggccgaacgggtgataaggaaggccgtcgctctgctcgccatgcattagaagtcctctcttgcacggcagcgtccagcacgcaacgagcagcctactgcaagccggcctggataagatcctggcgaggcgctgcgaagctggccgacgtgccggtcgcgcgcgcagcaggcaccgcgcgagcagaggcggagccgtcgctcgtcgccttttgtctacccgagctcattctcgcgagcaacagagctcttttcgtccccattcagctccttcaaggtccgtccagagactttaggcttgtcttcttcagctgctcactgctaaacgcttccttcctcctcgtccgggccgctgctgacctcccctcgcacggctctgcaggctccgttcaggctcgcatccgccgtccagacgcgattgccatctcccgaacctctcccgcctcgaggtacgcacatgaccgtgttactcctgtctgttcttacctttgtttgcccggctgatgcagtccatctctgccgccagatatccttgtcccctggtcgacgctcgagccctccaccgcagcccgcccaaccatgccttggcagacgatcccttctgagatccaggcaaagattctagccgccgtcgccgatgaggggcttcctttcgttgtccttggctctaacctgcaggaagaacaccggtgccggcggacgcttaaggccctcagaacggtctgtcgcacccgggcagtgagttaagtcgccttcgctggaaaagtgtgcgcacgctgacgctgtggttcaaccgactcagtctatccttgggtcggacctctttgagcgcctctcggtcagcaagttgtctgtctagtctaatttcaccgccgctctcaaggacgaccccgtccaagcccgcctcggccgtcacgtccggtcgatcgtcattcccgcacctaccggcttcttcatgcagaacagctacgcgctcagcaaagtcttctggtctacttgccggtccttccttgagctccagagcattcatggactcaacgcgccgacgccgaccttcagttttggtcccgtgcggcacctcggtctcgtcgccggcaatgccttgtcggtgctcgtcatgctgaagccgccctttggaattggcatcgctagcagcgacctctcgagcctgacatcgctcagcgtcctcaagtggcctactcgctgcctaccttcgacggaggatctcggccaagtgccgaatctgcagcgtctcgagatcggcacctacgacgttaaccacgaggaccctcagcgcatccttacgctcttccagaccatcggcggccaactgatcgacgttcgcatcaaccttttccgcctgagcggatcggtcgagcttgttgaccagatcttgtcatcattcgtcaacgtgaggactttggcgattcggccggccctgggagggagcaatgcgcgtccgcagctcccgcacctccgccgcctcgttctcaacttcgatcacattcaggtaactctgggctcgggttcaacaagcagtcgtgggttctcgacctgctgcacgggacagaaccgccgtccgcgccctcgtcggggtcggttgagtcgcagctcgccaaccctctcgaagcctgccaaacctgcgcgaggtcgtctttgagacgtcaggcctgtcgcctgccatgtccaaactcgtaacaacttttctttcgggcgtcgctccacgtcccgaagcccagggcattcgcgcgctcgacgcccgtggccggccgattgcgactcgctgaggtcccggctcggccaactctgcttcttcctgcttttctcccctggccttccctccccggttgacgtcctcgacacttgacgactctccgtcgtggtctcttgcttgaagcatgtgcttgctgagacacagcacagcagcgcaatgagacgcaggccccctctgtcagcgcttgaacaagcttggcctcgccttccgacttttgactttcttctgcgcaattaagcggccgccgtcgcctgatcatgaaagcaattgattcaggttctcagaaagcaaggacgaggattgtggtgatagcgtggaaggagaaggggaggtaagaacgtacagccgcccgtgcgccagagtcgagaggcgggcgggtggagtgtggcgacaagcgaagcaaggggaggacgaaggaaggccaacgaggggattatggctgattgggagggagcaagcgttacgagaggagagtgagagcaaggggcggcggtcgtgaatggagatcggtcgaagcaacagcagagacgagacgagggttgaccttctcgctctagttggtgccgtggaggccgagcccgctctcgccgctggcctgggcgtcaccctcctgcgcatcgtcgtcctctgtcaggtcgaggatgcgcaggctcaggctcgcgatctcgtccgctccattctcgccctcgccgccgctctcggagggcgcgccgtctgagccggcgccgttggccgtcggcgacgatggccgcgagccggaccgggccgatgcgagctggcggatgagagggaggagaaggggcgacgacttaatgttcttgtagagctgctcatctgtggaaaaggagaggcacgtcgagagaggggaagtcagaatctgggcactgcaagacaaggccctggagcacgcaccttccgactcgagcagctggacgagcgtccagacggcgatgtgctggaaagtcatgtcggaactgccgaggaagcggacgaggtacgtgtggaggccgccctcgggccggttccagaccttgttgaatgcattatagtcgtcggccgccttggacgagaggttgccgatcgccgcggccgagttgccctggacctcgaccgagggcgagttggtgagcgggatgaggacctcgcagatgccgagctcaagcagctggggcttcaggtcgtctgcggaggaatgaaaaacgaggatgaagtcagctttgctgacactgatgattggtggtcgcagagatgcacctgatagggcaaggacggcgacgcaggccgtcatctcgctttgcacgccgaccggtacgctcaagacgaggtcacgaatccgctcgactgcgccggcattgacaatctcgcccttgttcttctcgctgctcgcggcgaggttccggagcgtcgagatggcgtggcactggacctcttcgttttcctcgaacgagagaaggtcaatcagcggctggaggaagccgctgtcgatgatgggcgactcgttggacgggtggatcgagacattgcggacgcaggcggccgacgacagaatcaatggcaggtaggtcgaatgcagaagccgcagcagcggcggcaggccttccgacttaacgatctcgagctggtacttctctgagtgagtcaagatcgagcggacacggaacggctggtcagcatgcgggatcgagcaacacacaagagaccggccagccacgcaccatcggaggcaaggtttcgcagagcgagggcggcctggcattggaccttgagcgagggcgagtccatgagggcgacgagggactggacgagcttcggctccgactgcgcaagcttcttgcggttggcggctgatgaaaggggacgtgggtcagctttcgaacggacaagggccgcttagatgcctagctggacgcaccatcgacggcaatgttgctaagagcagtcgtgcagtagtactggacgtccgtgtcctccgagttgagcaggccgacaaggacgggaatcgcgccggcgccgacgagctgctgccggttctcgtccgagtgcgtcatgttgaggagcgcaccagtcgcgttccgctggacgcgcatgtcctttgaccgcgccagccgagtcaacgggacgagcgcgcccgactttgcaatcttcgacttgttgtcgtcgtgcgtcgcgaggttggtgatgcagccgacggcgttgcattggacctcgacatttgggctaagcatctgccggatcagaggctcgagcccgccgagccggacgatgagcgtcttgttgtccgggttgacggcgaggttgccaagcgcggccgacgctgcccgctggacctcgccgtcgtgcgagccgaggaggaagaggaccgggtcgagcgtgtcgcggccaacctcacggacctccttctcggtgatctcggcaaaggcgagcgcagcagaccgctggaggtcgacattgtccgagaaggagagcgtcgtgagggctgcgagcggcgagccggtgaagaagttagtcgtcgttcggtctggatagggagcagcgcgcaggagaagcaagacgagcggtacgacgacggagcggcgaagatggaccacagccgttgtcgaggggagtagagtgacgattggcgagcaggacgagaggtgggtcgcagagatggtcgaggagagcgtgttttttcgaggtcggggcaagacgaggaccgacagcaggacgcagtgacgggtaccggtggcaattgcggacgggcgggagtgaccgaggggagacgagcagcacagtttcgcagatgatgggaagagagggcggtcgaagcgagaggagaatggcggcgggcgtcagcaaacgtttgagcaggcggccgaccgagccagacgagtatgtcgctcgcctgacgtgagtggctgggattgatgactgactctcgaggtactggagcaggtctgcgacggcctcgcgctcgttctcgagcagcaggggctcattctgggtcgaccggcgggatgagcctgcgtcggagggaggcggccggcgcggcagtggagaggggggcggaggtggcaggagcgcggccgtcagcgacctactttcggcagtcttcaaacgcggcaaagccgaggtggaacgcaccgcagccacagcaagagtttcccatcacgacaagcggcggggttgagatgaacgatttgaggtgcgaagagagagggggacgagggagttgcgagcgagggccgacgatggcaggtcaacggccaagcgatgggcgcgcgcgcgcgacccgcgtcggcggctttgcctccgagatcccagcgcgaagaccggcagcagcagagagcatctcgccctcgcaccgaccatcatcagccagccatgtcgccttctgcaacgtcatcctcgagccaagggcccgactgtgcgtctctctataagctgcgactccgatccttaaagctgacttctgcgcccccccccccccttttctgtagcctctttgtgtccgccgccttcctttgtatctcaagccgccttccagtttgccatcgcagcgatggggtgtctcctcgcctaagatccacctgccctatagcgcgggaaatggtcatccgtaacactcgctgctagtcttcttgagctttcgctgtgaccgcggcggcgaactggcgtcctggtcatcgctgcagccctgctcctgcttcgcacgggtgggcttcggccgcggcggcataggcagcggtggcggtggcggccggatctcggagagcagtttaggtacgcgcgaccgcttcgagaggccggctccgggcaatcggcttgccggcggcaaattgttggctccgacggcaggcttgacgtcttgcgccgcgggttgtcgattggcgatgggcttgacgtgtttggcggaaggtggcgccggggcgcgttgcttgccagccgccttggctgacagccgaagagtagcgggcgagcgaggctcgggcttgatggtggcagattttgatgggcctggcgaggcaggctgaggtgggcgtgatgtggatcgtagtggctcgcgcggcggcgcaggcggcggcgacggcgcaagtgcttgcggagtcttctgctagacggcgctcgcgggtcagcggtcgcaacatggccggacaagtaaggcgagcacgcacgaaggctgggatatggagatcgaggactgaggttgaggctgaggctgtccttgtcggtcggtcgagccggtcgggcgccgagaagtagaccttgagccggctgacgccccgcggcgtccgacgctggccgtctgggcctgaccgctggcgatgctttgctggcgtttccagtgcctgcggcagcccaaccgccgacctcggcgtcggcgggactgaagcagccgctggctggagcgagatcgagtacccggcctcgcgcaggcggatgccagttcgcgcgcagtcgcgcacccactcggccgagaggacgaagcggccctcggtctgagcgtcgccaaggaggatgctccgatgcagagcagacagggcggccgagtcggcgaccgggccgggcgggagggcaagaaggacgtgtgtcgcgtgtgcgagcgaggcagtgagcgacgcgccctgctgaaggagcagggtgaagacgagcgacgaagaagggaggcctggcgggggcgtcgagggcgtgtcctcgacccagcaccacgtcggattactgaaggccgagacgaatcatacgtcagcctcaggcccagcagtaagagtcgagagcgaaggatgagctcacccgtcctgccggaagacgccgtcgtcgcggctagctcgacggctcccggaccttcggccggcgggccgggtcaggagcagctcctccctcgcatctggcgctggcccatccagcgcatcatcctcatcgacctcgtccgcttcgctgcctcccgcctcggacgcgctctgcccgtcgtcgtccgacagtggctcgtccttgacgagccggcgcgtgaagagctcgaccagctcgtctggctcaacgagatcgatgccgctgctctcgctgccctcggcatccgagtccggcttcgagtatctctcggcgatcgcgtctagcgcgacctgatagcgtaggtaggcctggtcgaactggtcggtgagggatccgtcgctcgtctcgagcttgaccggcaccgctgcggaggaagggcgtctgccgccagtcgtcgccggcatcggggtagccgcgagaggtgagcatttcggatcgattgagagcagcgacgtgtcggcgacataggacgagctcgagggcaggtcgggcacatgaagcgaggaactggcgagctcggtcagcgcctgttgggacgaagcggccggccaccgggcggcgctcgcaacgagagagggtgtcgccggcaagggcgtcagtggcgagctggccggcgcctgggcccaacctgtagaaggcggtagggccatctgacggaggccttgctagtggggaccgaggggcaggttggggtgacactagaagttgagaaatgggagtcgaggggggaatgcggttcggtcactctcgtcgggagaaaggcaggcgcgtggcgcgtgacgacgacgagaggaagaagcgagaggaagaggtgcgtcggtcgcagactcatctagcgagctagctgtccgacagatcttccgatggcatggtcgcgatggcgtccagagctggctgagggtacagggacgtgggtcatgaatctgcaggcgacctcgtttgccccccaccggcggatgcttcgcccggcgcacgctcctcgtcctgcccctcctcttcgaacagccgggcccattcgaggtagagccggatcactgagtgagtagagacaggggtcagtactttctgggcataagtctccttgagaaagcagcagcgcggaagacgcactgtaggcctgcatgtcgacgacgcgcgtcgtccgagctgcccagcaccggccggcatcagccattcgccgggcgacgtcgtcgaagagagcaacgtcggccggagcggcgccctcttgtttaaatctggaggggggaagaaggaaggcggcaaggggtcagcagcgcgttgccagggatgcagaatcgggctgcgtagcccgtacgagggacgaacagggcgaggatcgagtggacgtccgagtagtcgacgttgacggggacgtagccgacgtgagccgggaagccggcgccgttccactcggtaaaggccgtggctttgagtacgagggagcgcgagcccatcagccgcgggaagcgggccgaccaagcattgcctgttggcgaaaggtaaccgaagcggggtcagatcgtgtcgaccgaccagacgatgcgagttcagaaaccaaccgtcgacgtcgagcacatattttgcacggtcgcccgtcccagcggcatccttgccaacatacgagtactcgttgctgcttcgacgaccgcggcccagttagccaaaccgcagaagaccaggacagggctctacgccaagggtggtactcacgccagagctgagcaagagccgtcggtccacgaacactgctggcccttctccggccaccaatgaaagaggcgccaccagcggccggccgcgagatggatgtcgagccagcgggccttccacccgccgatggcgctcggcgggcgctgaggccggttgactggccggtcgaccgccgagagagagccgttggtagactctggggcgaaactcggcgaccagctcggccggccggtcaaagggtcggcgtagagcgcaacgttctcagcctcctcgccgcttgaagggggtgggttggcgaaccgatcgagcctcggccgatgagctgcctcccacggtcgttgcttgttccgagcgtcatctccctcgcctgccgccggccgaccctcgttctgcatgcccgtcgcgctcccgcgccagtacagtttgccggccttctcccgccacacaggctcgtccatcgccggccggtcgaggacgccctcgattccgaccgctgggatgagcacatcggagtgcagcggcgtcgaggcgaacgagaggattggcaggagctggtggtatgtcaagggcgggccgttagtctttgccggatgcgcttgccggaggtagaagccgtgctgccggaggagctgtgacggaagcaagaacgttagtctgatgtctgtcgacccaaacattggccttgtgctaaagcggtcgcactgaggggttgaggcacggatcgctcgctcgccgagtatcctggacgaatgcgatctcgcctggccaacgactggcgtcgtcggcaagggcggccgggaagcgcttgggttcgcgccgggcacaaagcgcgtgccagtcgaccgttcgtgatggacgctccgtcgcttgagtgcacgcccaaaggtcagtctttctgcgaggacactgatggaaagggtgccaacgcacggtcctcaaatgcgcccccaaccttcgggtcgagtagcacaacaggttcgtcgagcgtgttgagcacggccgtgaacgacggcggcaagaggtgtgcgaccggcgcgagcagagcgaggtgcgcgcgcactcgcttggggacgggcatggtgtctgaggcgccgacgaacgaaagcggcgaccactgagttacgagcaagtctgatcaagactaacctttactccgtaatcagcgaacaatggggacgtaccgacaggccatcggcgtccttccggatgacgaacaggcccctttgctccttctccacgtcctcaccgccggcgacgtcactcgcgtcgagcatctgcgttgaccggctgagccgctgccggcgttcagtgggtgagagggcgaagtagggctcgaggaggtcggtcgcggcgtgagagtcgggcagcactgcaggaggggagagagcgtcagcgtgatgacgcgcatgattgagtagaggagcaggcggcgactgactaacgtcgtgcgccttgacaaaggcccacctgaatcgaacccgagaaaggtgttgtcagcacagcccggcggcgacagtgccagccacacgcaccatctgtcgaagccgcgcggcggcgcgcgcttgtagcgcttgaggtagtgggcgacagccaggtcgtaggtcgtgctttgctcggcgagccggttcgcgaatgcccgctcagagtcggccatcagatggaggactgggtggaaacggccggcgtcgatgccggtcgtcggctctgattccgcagggccagctcggaagaggccgtctggcttggtcgggaccgcacccttcgaggctgccttgcggagctcgcctccaaagggaagtccgccgatgggcgacgggccgtagccggcgcctgaggtgagaagcccggcttggccgcatgtccggccgaaggcgaggtcctcggcccgatcaacgagagctgggtcgatccagcggtcgaagggcgaggcgggggcgtccgagcgagtgagcggtaggtcgggcgagcggaccgcaaacgtctcgcctagctcgagaaggacgaggagactcgcgagcagaagagcgaggccaagcgagagaagaagcggcagcggcaggggagacggcgctcgtcgacggcggccgggcgggggaggggagggagagcgagaggccgaccggacgaacgactggacctggtcgaccagccgggcgagcatggccgccgagcgatcaggttgggaggccttctcctcttgcgcagcgtcgggtgtcctcgacctgcttcggagtcaggtaggctggctggctggctggctggcggttcaatgggctgaaaggggtcggactctgcgcggccgatcaagcgtgccgacgccggcgaaaggcgatcgaggcagggccatcgtacctgcagcactcgacgtcgacctgtctgtcctgctcggcagcctcttgcgtcgctgacagatctcgctgagcctgaatctgttcctttttacgagcttgagaggagggcgcatcgtccgacgctggtggccatgccgcccgtctctgtcgcccgggaccgccgtcgacgcacgctcgtcacgtgctccagcaggccacgaaggtcgtccttgttcgccactggacaaggcatttgagcgcaatcggcctggatcagacgcctgtcgccatctcggacggcgtagacgatgccggacaccccctcgcggcaacgatcttgcagggacaggatctgcgatctctgcctggcaccctcccttcgtcacctccttgcctcgctcgctcgcgacgcctctcatgttctgttgccactaccgctctctgcgcccagccgtagaagggacgcgatgaggctacagcccgccggtgagtcgttgccagaggttcggttccggcggctcgtccagcagagcggcgtcgtccggccaagcggcgtcgctcgtctgtcctggtcgctcgcgccgaggctgccggtcaactgttgaccctcttgattcctgtccgtcccctgcgagctcgtgcacatcgggtctgctccgaagacgaggcgcgaataggaggcaaagaggagcaaaggctgatttggagagctaaagtggcgccggggcagagcgatcgaagctccgtcggctcgagcgggatgatgcgcttggcgtcgtctgtccctccgatgctcctgctgccaacgtcgaccctcctcctcctgacctgctcgcagacatcaaggacatcatatctcctgctttcctgaagatgccgtcctggtcggtcatcttctcgactgtcgtgctcgtcgctctcggccggctcgcctttctcgtccgccggcttcagcggaagacggctgtgagtacctctcctctctccctcgcctgcacgttgcagctggaaggtagggctggcgccggcgtcatgctctggcctcggatcgaccccgcttgacctgctaagcgaggcgagcaaggctagcttcgagccgaacgagctccctctctctgatcgtccaccgaaccctcgctgatgcccgagcctctcgcccgctcgctctagccgcttaccgtcccatcgaccttcttcatcctcgccatcccatggcgcgtcatggtcccgcatatcccgctcctgaatccgaggcgcctgaccgactggtcgacccgctttgcgcggtacgaccggcagggcgcgaccgtgaccaagacgacgaccctgatgacgggcaagtcgactgtctggctcgcggagccgagggccgttaaggtcgtctcgatcgatcggcgggcgtggtcgaagccgaccgagatgtacgaggtgcgtttgctgattgccttaaggatccgcgaccgatgcagagcagaccgtcaccagcgtctggcgcgtgcgaggtggaggctctcgcccagcgtctgctgtggtcgctgacctcgtaccgctcgcctccagatcctcagcatgttcggctccaacctcgtcacgcttgaaggcgcggcctggaaggctcatcggcgcgtcgtcggcccgtcattctccgagccagtctatacgggcgtcgccgacacgaccggcgccgtcgtccaggagatgatgacgagcgagggttgggagggcctcgcgtcgggcgaagtcttggaggttccagacatggtcaagctgacgatgcgcctcgcgcttgtcatcatctgtgcgtctcgttgacgtcgccttcgccctccgtgaagtgccggagcctgacataacagtgccgcctctgcctgctctgatggaccccagctcgcgaggcctttgcgatccccatgccctgggatgagagcaaacggccgatggcccgggccgaggggcatcagctctcgacgagcgaggcgctcggcattgtctcgaacgaggtgttccttcgtctcctgacacctaaggtacgtccgcagtgcagcgtccggctgactacctgcagaagttgatgttttccccctccttcgcaccgcgcattgattagtgggtgtaccggcttccgatcgcccggctgaagcgggtcgaccaggcgttcaacgagctcgatgcccatctgctcgcgctcgtccgtgcccggcgggctgcgctcgcttcaggcgctgatgagggcagacccgacctgtttggatcgctcctcctcgccggcaaagaggatgatggcgaggaagcggccgacggagaaaaggtcgatggctcaagcaacggagccggcaagcctgacggcagcgccgaaggtttgactgatcgggaagtcctcggtaacaccttcatcttcttgctcgccggccacgagacgtcgggccacacgcttgcctttgtcttcgccctgctggcgcttcaccccgaggcgcagcagaagctgcacgaccacgtcgccagcgtccttcccgacggccagcagccggtgcgtccctttgtcgtgacagcctcgctggccatcgctgacaattccttgtgctcgcttgctttatcagacctacgccgacttcagcaagctcacgcactcgctcgccgtcttgtacgagacgctccggctcttcccctctgtcgtcgtcattcccaagcgggcgactcggacaacgactttgccgtactctgttaagggaccgaccggcgggtgggagcagacgcggctggaggtgccggaagggaccgaggtttacatcgacgcagcgggcttgcacgctaatcgtaagtcgctcagcctctcgccgagcctcctgcttgcttgaacagctcacccttctctgcttgcgctcctctgccagccgagtattgggaggacccgctcgacttcaagcccgagcggttcctcggcccgtacgacaaggacgccttcgtccccttctcggcaggcccccgcgtacgttctgcaagactctgacttgcgctcagcccacagtcgtcctcacttgcgcgtgctgactctcgtccttcccgaccgataggcttgcgtcggccggcggtttgcagaggtgacgaccgtcgtcatcatctcgctcctcgtccgctccttcgagttttctgccgtccctcggccgggcgagacgcacgaggcgatgcggagccgcctgctcaagggcagcacgacggtgagttctgacccttgtcgacgggcttgtcggagagtgtgctgaccgcctgatctttgtgcgcccctgcgacagctcacactcacgccgaaggacctcgacctccgtctgcgcaagcgatgacggggcgcgcgatgaccgtagaatgctgtatccaaagaccttgaccgttccgcctttcgaaagcagcagcgccgtcgctcgcacttctcactcgctgacgtattctgccctcggggccgagaacgtgaactttaatacgtcggccctctcgatcgccttcagctgctcccgacgctcggattcagctcgggctctcgcaaaggctgcctccttctcctcctcctcctcaacctctacccaagactcgcagcctaggacgtcctttgactcgccttctctggcagcgctccgacctctattagtgaaggctcgttcagcgccgcccaagtcccctcgtcggacgacaggcgcaggggcgtctcactcgaagcgcgctcgccctgggccgtgcctctgttcgctgctcgtcctcgctcgcccgaccagatcgggccggcttcgctagcgagtgcgagcatggcggacaatgggcggctgcatccgatgcagcgaagcgctatcttctcgatggccgatgcctgtcagcctaagcaacctcccttcgcctaggcccgtgccgacctcgagctgaccccccgggctgcgccgcaccgtttgctccctctctccaaccggcagtcgtcgcttggacgctctacggcatcctttgcgtccagctcatccgctacacgtcggccgtccggtcacatccgggccgcgagtcggtcttccagatcagctcggtcgtggtcttgttcgcctgccggacggcgcaaagcctcctcagcctctctcgcatcgtcaccgtctactctacgcacttcgtcgatcctttatgggttatcgactaccggaacaatccgcagagcccagcaaacttctttatcggcttgttcaccgtctccctcgtccagcgtgcgtctggactccttctgtcgcggtcatctttggctcgctcgctgacgccgcacgaatggaactcgtcgcctcgtcgcagtcctgttctttcaccgggccctcgccttcgctaggcatctctaccctccaggtccgatggaacttatccgccgcgcggcagtctgcatcggcggtctgctcttctggacgtgctttgcctcgggcctgacggccgaaatcttgcggatgcgctttcgcctgcagtcagtccttttcgctcattggccgtaaggagctcgctgacactcagcttgcgacgagatcaggcccgagctacgcgatgccattgagcgggagggcgcgccggctttcctcatttttcaagtcgtctggctcgcgagcgcgctcgtcctgatggtcgtcttttcggcagccaccgcccgcgaccacctctacgcacacgtcagtcgagaccgccgacgacagttgcgccaaaagcctgggttgaccctcaatcccgtggcgcagcgcttcaaccaagagagccgtctgccggcaaccgacttgacgacggccatcatcaaggaaatgctgagagtcggcgccacaaactccttcctcatcgttcgtgtctcccctggctgggcgctccatttctgactagattgactgatccccgtcgctcatcgcccaacggatcctctaggtgctctcgacctccatctacatcttcctgattctctacttcaaagagacgatcggcggccggaattgcacagcgctgcgagttccccttccttccaggatgatggctcactcaggactgacaggcatctccctctttcctgcccttccagaccggccgtctatgcttgtagccttctcgtccacatcatgcagcctcgagcgctccgcgagcggtgcgtccggttgcttggtcgagtctcccgcgcctctcactgacgatcgtctcgtcctccgcgccgctcagtcaaattctcgaggctgtcgtttccagttctgagccccgtaggcatgaaccatcgcttgcgaccaagaagcggctctttggcttcgtcggcaagcgtcgtcggcaagtccgtgggggcaatagtgacgagcactggctctcgccatctcgcctggtgcgatcaccgggactcttttctgtccttgtacaccgcgggcagggcgcgcccggtttgccccagccgtacggtctccgacgacggcggtcgtccgttccccctgacggcgtccagaagacgatcgaagttgtttcgtactctgagcgcatcgacggcgaggaccaggtccgcagcctcggcgtcggttctcaagactgggagacgcgcaatcagcgtcttgggattggcaactctgtcgtacgtccatctctccatctgccactgtcgaagctcagtccttgctgatcaaggccgacctgcctctgacggcgccgtcctgccttcaccagtgggtcgagaaccgccgattgcgccggccgctaagcgtgaacgaccactcgtcgccgacgcggacgagtctaacggcggcgtcagaccccgacggtcgaacctcattcgcaacgagttttggcggcggcgtctcgtctctctacgcctcgccctctcgtctgtcgggcgttcgtgcgccgccgccggcatcgcctgttgcgcagtcgtacctcacgtccttcccctcgggcccggtcgagtcgcagcgccttgcaacctagtcagtcgtcacactgcgcgccttatgtcgtcctgctgctgacgctttgtcttgctcgttcacttcgctctagcgaccccgacctcgacatggtcgacctccccttcctcggccagccgctcgaggaggtcggagcgtccgccgtcagacctctgcctcccgccctgccgccgcctccgacagcatcgcacgtgaccttttgggggtcaaattaaacttgtatcgccatgttgtactcgcacctcgtgctggagtgagggtggctgtcggatcaaaggtgctcgtgccgaactcaacccgcgaagccgagcgtcgagcgagccctcgttgagcacctgcttgacagccatcagctcggctgagcaccaaccataccaccgtcatacccctctcatgatggctcccgcgccgcctccggcggacgaaccggcggacctcccggcgttcgagcgctcggacagccgtcgccggcgcgtcgtccagggcagcgtctgccttgccttcgtcgcctcggccacctggacgttcatcgcctggcgacgagccggtcatggctggcttacggtctggcagctcgccgcagcccttgcttgggtacgcgagaagcagcctgcatgctttcagcttgtcgtcgggagctcgggctgacgccctgagctcggctccctcgcctcgtgccagctccctgcggtcggcagtgccttcctactgcacagctggcagttgccgacgatgcttgccctgctcgttccactcctactctcgcctccgagcctcccactgtcagctttcgtggtcgcccaaacctggacgacgttcctcctcctgctggctggcggctctcggaggggacccgagatggtcgccgacccggttgacccggctggccgtgctcgtgagtccggcgacgacgcgaacggcgtcgacaacgacgactacgaagcaacggtcggcggtggtgaggatgggctcaaggagccgctccttcggcagcaagagggcagggtttcggacccggcccgagcgagcgtgctcggcctcatcctgttccagtgggtgcgtctggcgagccgccggccggccgtactcttcgcctccatgctgacctcagcactctgaagccgcttccgctcatctggctttcgcacagggttcgagtgcttgccccgcaccacctccctatcctcccgcccaccgtcagagcgagggtcgtcgtcgcgcagcagccagtcgtgcgcatgttcgctgccctccttaagccagccggggccgatcaggccaacgcctggcgcaagctcctcggcgagatctggagcgtcaatcgtcggggcatcctcatccgtgcgtcgcgcctcagaggctgctcctcgacacgtctggctcacccgtgaccttgtttcgcagtggccgtctttgccgtcgtcaaggcgctcctcacctttgtcccggcctaccttctctcggaaatcatccgctcgctcgaggtcgaggagaccgaccggacgtaccagctttcgctctgcctcggtctggccgtctcgggctcactgagtggcacactcgcctctcaggcgtcgtactgggagatggctgccatctccaagccgatccacttccagctgcgaagcctgctgttcgagaagactctccggcgcaaggacgtcgtctcgaccggccagcatgggcacgccggcggcaagacgcaggttcagaacctctttacgctcgacgtccctcgaatcgccggcctcggggccgacctggccaacgtctcgaccgcgcttgtcgatctcataatcggcacctgcctactctactcgctcctcggctggtcctcgctcctcggcctcgccctcaacgccttcacgatcccgttcaacaagctcctggccgacttcacgttcaacgtcgaccaccgccggtcgctcgcgcgggacgagcgcatctcggccgtcgatgaggttttcgcaggcatccggggcgtcaagctggaggccggcgaggactactgggagactcggatcgagactctccgccgcgaggaggtccgcttgcagcgcctgcgctactggctgggcacagcatacaacctcatctggtgcacagtatcttccgtcccgttactatcgccatccctgcgctgactcaccctctttgaccacctctcttacagggggagcctgcctgtcctggcaatcctcgtctcgcttacctcgttttccctgctggccggcggcgagcttacgccgcacgtcgcctttccggcgctcgccatcttcaacggcctccagctcgtatggacggccgtgccctcgacaatgacgcggcttgtcgaggccggcgtcagcttgcgccggatagccgcttacctcggctcttccgaggtcattctctctgacactgcgccggcaccgatcctcgtggacgttcgggagcacttcgagctatcggacgtgtccttcgcctacccaatcgacgcgatctcggaccagccggcagtcgcaggcgttgacttccggttgcgcggcttgtcggtcgagctccatgtcggcaagctcaatctcgttgtcgggcctgtcgcagcgggcaagtcgctcttcctgctgggcttgctcggagaggccgatcagcctgaagggcggcacgacttcccgcacagcttggaggcagatagcggcgtctcgaccgacgctattcccgcctcagcctggctgactgagggaacagcctacgtgcctcagacctcgtggcttcagaacacttcggttcgtcgtcgatcgctcacccctactgtcagtgctgcctgaccgcgccttaacctaccgcgtcaggtccgcgacaatattctcttcggccttcctttcgaccggtctcgctacgagcaggtcctcgactgctgctgcctcagaaccgacctcctgatcttcgcagacggcgacctgaccgagattggagagcgcggcctgacgctgagcggcgggcaaaaggctcgggtatctctcgctcgtgcggtctacagccgagcgcggcatctcctcgtcgatgactgcctgagtgcagtcgacgctcattgcgcccaggccatctttgctggcttgcaggggccgctccttgccggtcgaacgctcgtgctctgcacgcatcatgtttcgctctgcttatcggccgctcacgccgtggtcagtcacagtctgtcctaaagccaccgttctcagctaacccggagtgtgcgaccccttttttgcagattgcgctaaaggcgggcaatctgctctttagcggcgacgcggccgccttcgcctcctcgcccctcttccagggcttcattgaacaggctgagcagcctcctcccgacgccgaggagagcggaccaaaggccgaccactcgcagccaccccaaccggtaacctggctcacctctgcaggcgaccgcagcaagccggttccggcacggaagctcgtcgcagacgaacgacgcgaggtcggcggtatctcgctcagcagctacgccatgttcttgcgagcctgcggcgggccgctttactggacgctcttcgccgccgcctaccttggcacccaggcgctcgaccttggatcggcctggtggctgcgccgctggacgtcggccaacgcgaccgaccgctccgaggtcgaagcctacctgctcgtttacgctttgatcacctttgctggcgtcgcaggcagcgcagtgcggtgtgagttcgccctgcagtagacagagacgttcaaggctgcgccagactgaccttccctattgctgctgtcatcagggatcgtcctttacgacggagcgacgtccaaggcctcggtcgtcatccatcagcgtgcgtcccttcgggcctagccctcacgacggggcgtgctgactcttgcctctcgcgtcctttctgctaggcctacttcacgctgtcattcgcgcgccggtccgctacttcgagacgacggcccacggcgtgctcctgaaccgtttctcgggcgatatgagtcgcgtcgacggctttctgcccgacgactttgcgcgctgcgtcatctactcgctcagcctcggctgctcggtcggcatcctctgcgccgtcgcgccgctcttctccgtggccgtcgtggtcctcacacccgtcttctggctcgtcggacgagggtgcgtcgcggtctctgcgctcgaaagtctcagcgaaactactgaccctagctgtctcgcaggtacgccacaattgcgcgcgacttccgacggctcgagagcgtgtcgagctcgccgctctatggtctttttgccgaggtcatcggcagcggcggtattgccgtcatccgagcgtgcgcgcctcatctgcacgtggtcgagcagagatcgcaactgatgcttgcgcaatgcttgcaggtacggctgtactcgggcgtttcgggaccgcatgctctcgagccaggacgaccagacgagcctgtcgtatcacgcgcaatgcgtctatctgtggctcgtgacgacgttcgcgcttttgaactcggccttgacaggctgcgcggggtgcgtgctcctccttttgccttccacccggttgggcgactctctgacttgcgctgcctttgccgccagcgtggtactcatcctgcttagccgcgacgccgccgcgaccggctttgctttgacctgggcgctacagcttgggccgagcatgcttgacctgatgcttaggtatgcctcgctcgagctgacgatggtctcggtcgagcgcatccaagaattcttagccctgccgatcggcgcgcccgagatcacgtcgatccgcccgcccccgggctggccgacggccggcgctcttcgtgtcgaggatctaacggtgcgatacgccgacgacctgccggacgtgctcaagggcgtgtcgtttgagcttgcccctggcgagaatgtcggtctcgttggggcgagcggcagcggaaagtcaacaatcgcgctgtcgctctttcggatggtcgaagctcgagcaggtcgggtcgtcatcgacgggctcgacatcgcgaagtgcgttctatccaggctctcttcctgatgaagtgagaggctgacctgcccccccccctccctcaaacaggctaagcacgcaggacctgcgctcgcgtttgaccatcatgtacgccgggtggccgctcagtgagctcgccgggcgacgctgacgccccaatcatcgcccctctatagcccgcaagacccttcgctcgtctcggggacgctccgctccaccctcgacctccggaacgagcacccggacgaagcgctctttgacgtcttgcgaagggttcacctcctgccgtcgcccgaggacggcagccgaccgcactcgcccttccgctcgctcaattcgcccgtcgcgcagcatggctcgtgagtttgccggcaatcgcctgcagtcgccgcgcgatctgttcgacgctgattgagtgatccttgcgacgacggcgcgcgacaggaacttctcgctcggcgagcgtcagctgctcgtccttgcccgggcacttctccgcgggtcgaagctcctcatcctcgacgaagcaacgtcctcgatcgacttcgagtgcgtccacctttctttccttcagctatggccgcagactgaccctcatgcgcgtgtcaggacggacgagctcatcacgcaggcgatcgccgaggcgttccggcactcgagcctgctcgtcgtcgcccatcggctccggaccatcatccactttgacaaggtgctcgtcctcgcgcgagggcgcgtcgtcgagtttggtgcgttgccgtccgtgccgggccccttctagcgcgctctccttgcaggtcggagactgacgtcgtgcgccttttcggatcgttcagacgccccctcgcgcctgctcgccgacccggcgtcggccttctacgccctctgcaagaagacgggcgagctcgagcgactcatccgactcgcaaacggacggccgttcgagtttgcccagacggccggcgaggagtcgccttgatcacccatggtcttgctttgtcgtgcgaaagcggaggacaggagtcacaagacaaagcaggcggacatgctggatcagacaaggggggagtaggaagcaggagaggtgcagtggagtcgcggctctgcgcgaagggctccggggactgcataacgtaaggacgggtctgttgtgcaaagcggacaagggggaggaaggtgatgctgactgtacgagaggtggcgcgctggcaaaagtgtaggggcggcgcaggagaaggaaggggacgagctagagggacgggcaaaggggagggagggtccgtgggagggtgtcaaggtggggcgcgggcaaacggggaggccgccgacggattgaagcccgtgcctgcggggtatacgaggaaaagagaggcgaggggggtcgaccgatgcctgaccggtgggacggtaaatgttcgagagagagagatcgctctagaggaggaagacggccgtggccgcgccgacgagggcgacgagccctccgctgaggacgctcgaccggcccgcgcccgagagtccgacgccgcccatgcccttcgcgccgccagcagcagccgtgccgtttccagcggccgaggcgcccgagctcgtcgccgcattgacaatgttgttgatccaggtcgtgccgcacgtcttggcggccgcctcccagatggcggcctggccgccgaggatcgggctctcgctcaagccgagcgcgtacgtcgtctgcgtctcccagtcggcgtaggcggagaagacggccttggcgcaggacgagcagaggagcgaggccgggtcgctcggctggaggaagagatacggcaggttcgtgagtcggtaggtggttgcgttggggtaggtcccgtccgagtcggtcgtcacggccgacggagcgcgcttgacgaggggctcgctctcgaggccggtgacgagcttgagcgaagaggccgagaggtggccggcggcgtactgctcgggcgtcgtcgtcgagccggcaagctccttgacggcagcgaggttcgagagcccgatcgcattggccgagccgccgccagtcgcgttgcggctgagggcgctgacgcagtaggcgttgctgtctgcgtcctttgtgcagacgacctccttgagcgggataaccgtgtagagaatgtcgtacatgttgcggacggcctcgttcgtcgggtcggcgagctcagccgcgcagtgcgagtaaaagtccgtgagccggccacgaataaaggcgttcgagcagccgttggcggcacagagcttgtcgagcgagccagagagcgaggccgccgatgacgagatggccgcggcgttggtcgccgtcaggaggggcgtgacgcacgacgcgagcatcgcgtcgctgttgagcgcggtcaggaacgaggtgcaaccggccgagatattggtcgggatgacggccgagggccggctcgacgaggccgaggacgacgtctggaaagacaagagaggtgggaggaggagaaagcgtcagccgacggtgtccagagggtgaaaggccgcctgatggcaaggtccgtcctgcacacgacccgccaacgcttcgtggcgaggagctgctcgggcgctctgcgccgtgccgcgccggatgaggcagtcggagacgccggagacgtcccttgtcgccctcgctcgccgccctttgtgctcgctcgcccgccctcgcctcgcgcgcgcgcgcctcccggcctgaccccgccgcgacgcctcgtgcccctccgtcctcttcatccacccaaaccagcaagggaaacagaaggacgcacagcactagccgatgatgactgggcctggacggccgaagcggcgccgagagcggcggcagtgagcgagaagagggagagcatcgggggcgggtgggattgttgtttgatccgggctgggcttttggcgagggggacgaaggcgagagagagaccgagcgagtgacgatacgaggtcggtgaaggaaggacggccaaaggagggtcgggtgcttgctggctgggtcgactggtgcgaagaggggtccgggacgtgttggaggaacggtgggaggaagagaggagcagcagagagaagcatcaacaggaggaaggcagtcgcgctttgctgagccctggagagatgcatctagtgttatagtaatgcatcgcaccgcgcaggaggccgtcgtcggtcgatccattcctgcagcttcccttgcggtcgtccgagtcgcaggtgagctgacaaggatgacccaactaggcagcggcatttcgatccgagcagcttgctctccttgcccaaactgcactgctggggcatgctgcgtgggatttagagcctgcagcgaagggcgatcggccgctgcgctgcgcgcgtcatgcggacgcgctcgcaagacgccgcagccatgccttgcttgaccgttcaacggccagtcagcaggcagcaccagcagcagagagcaaagcagagcacaggcaaggagacgacacgcccttgatatccctcgatcaacggccggccacatcttccggcgctctttctcgctcgccctccaccagcccgaccatctcggcccgccaagcgcctcagcccacgccctccctccgaccgctcgctgcgagcctctccctcccataagccagcatggccctacgcgaggcgcgcgacaagatatttcacggctactggcaggacgccctcgagaacgacctaaagcgcatgagctcgtggggctcggacgggtgcgtggtgcctccgccgcttcttcgatcaccacttggtcccgctccccccccctggactgacgcccttcgtacctgctcgcaggttcaagaaggactcggagcacagccaggcggcccgtgcgtcgtcgagcggtcagcgcggcaacggcgaggggtcgtcgtcgaggacgagcgacaacagcagcagcggtgggctccggcagcgcgtgctaggtcacgtcaagagcccgtcggcgagctcgcgccggtcggccaccagccaaggtccgcgtctttggcctcctaccgtgtaccagaggacgaaactgactcccctcgattcccaaacgctctccctagcgagcccagcgacctccggcccggacgccccgccgcagaacgtctcgctcctcccgcagccgcccgacgtccctccccttgtcgtcgccctcgtccgccagctccagacgctcgcctacctcctcctcttcgcgacgaccctcctctggctcctcatcgccttcgccgacggcccaaaggtgttcgtcctccgttcgctcgcgtgcgcgacgctcggagcggggacgaccggcctcgcgtggttcgccgcgcgctcgctcgagaaggaggcggagggagagcgctggcggatccacaaggcgcgggcaaaggagcactcgccgccctttgtcgagtcggccgagtggctgaatgccttcatcgagggcatctgggggacgctcaaccccgacttgttcgcttcaatcggtgcgtgtacccgttttatcctcaccggacgctgccgccccctgaggctgactcgcttctcgtccgcaagtcgacaccgtcgaggacattatgcaggcctcgctcccgcagtttgtcgacgccgtcaagatcagcgacatcggccagggcgtccacccgatccggatcacggcgatccggccgctgcctgatcgcgaggaggacggccggacgaagggcgacgaggagcgcaaggcggaggagcaggctgagccgggtggccggtactcgagtcgggaggagacaaagttcatcgtccgtccctcgcgcacggccttgcatccgccaggtcgctgacctccgcctcctttgcgtctgctggctgccagaacctcgaagtcgccttctcgtacaagtgcgaaaagtttggccgcgagtcaaaccgccagcggcacatccacctgctcacccaattctacgtcggcctcgccggctgggcgcagattccgatcccgatctgggtccaggtcgatcagattgtcgggacgcttaggctcaggctccagatgacgcagcactttcctttcgtccgggacgtcgtatgtgccctttgcgctttgaccccgactggggggacgacactgacgctgcttctgtgtcccagggacgggaagcaagacgagatggtgggcgttgcagggcagcgagctcgtccctccgagacgcgtcctcgcgctgtctttccctgtctttcctcctgaccatcatcctcagctcgcctccgacgtagtaggcagctgtcttaggccttactggttactgtcgactgatatcgccagcccgagctgcgtccagggggtttgctgttcagcagccctctcgcgccttccctcacactctcgccgctcggctcatgtcgattccctcctcgcgactctaggcagaggttcttccccgtccgccgacttgcccggtccggacgaaggttatgaaaggggatatagtatcgcgcgtcttccgccgcgcccgtgaccttagccgctcgccgcagccttctccccctgatcagcctagaactgagcaatctgcttgcccaggcgctccttgaacaccgagtctgcgaacgggacgagcaggtggtacggtcagcggatccaagtcgagcgcgccaattgaaggggctgggctggagcgacgctgaaggaaggggcacgcacaggcagacatgatcgtttgctcgttgatgacaatctcgcccgtcgtgtctgccttgggcttcgacacgcgcgatgcaatagcgaccgggtctgtctcgaggatgatgctgcagtagacgggaggcgagagggccgacagctgtcagcgcagcgcggtcgggcgggcgacgcgcaggcggagcgggagcggcacgtacccatcgtcaaccgtctcgtcgagcgcgagcaggacgaggtcgaggttctcgagcacggtccgcttctcgatgatgcccttgagcaggaggttgacggcgtcgtagaaggccgaaagcgcggcgtgcagcatgagctcgttctccgtcgttggcccgacgagatggaacgtcaggtcggtcgccgccttcgtcaggcatatcgaggtcggcgggatcaggaggacgtcggctgcgagcgacaagagcattcaggtcagtccaacgggcgcctggaggggctcggctgccctgatggcttgggatagccatgagctgagctgagcggcaagggcgcgactgaccgagacccttgcgcgtcttctcggcgacgctcttctcaaatgcccgctgctccttgagcgtcgggtacggattgccaggcaggctcgagttggtcgccgtgccggctccaacgccggccggctggtgcggcggcgaccagtacttggaaacgacccgctggccctccgcgtcgaggatgatgaggcaggtgcacgagtagagcgagacgttcgcctgcgacggatggccgttgcatcagctcgcaaagctttgacagctcagtctacatgaccttcagcacgacgcaccatgactgcttaggaccaggctttgtagagggacgagaagggagctccgcgagctagaagcaaggtcgtaagggggagatgtggtttggaggatgattgcggtcgtgttgccggctgcacgtcgacacccacccagcttgcctccctccgatactcgccatcgccctctcctgtagccctctcgaccccctaccaggcctcccttacagaacacctacgcagacaagatgagcgagatggaggttgactcgagtaggtccagctctggacggctcgcgagggaggctcatgaggctgaccgccttcgcgcttcgtcctctgccttgcttgccatcgccttcctgccacctcccgtcgcatgcctgctctctcaggcgccaagaggcgagtctctactgcctagaacaaacgtacgtcaccggtcttcacgtcatgctccggatggccttgactgaccgtccttgcttgccttcgacagtcgcgcgcggcggaccccggagctgacctgctccccgctgtaccgctctcgacccgcagcacgactgtcgaggctgccggccctatctccaaggtggacggccagaatgcgctgcgctgtgcgtccgcgcagaccctactcccttgcttccctcgcactctgtcgactgacgccatgtgcctctcggggtctcccgtcggctgagcagccatcgagggctggatcgtcattgtcaacggcgtgcacgaggaagcgaccgaggaggacctccaggataagttcgccgactttggagagatcaagaacctccatttgaacctcgaccggcggacgggttacgttaaggtgcgtcgtcgcgcgcgtctgctgtgccaaggcagtcggagccacgttggatccgacttttagcgctgactgagtctgcttcctttctctggcttcctgtgcgtgccagggctacgcgcttgtcgagtacgccactttcgaggaggcgcaggctgcgatcgccggcgcgtcgggcacgtcgctgctcgagcaggagctggaatggtctgtccctccgaccctttgcgatgctctcgacgaccggtaaggctgtgctgacgggctcctcaacttcccatagtgacttcgcattcgtcaagccgccgcaaggccgggctggaggccagcagggcgcgcgcggccaggccggtcggcagcgcagcaacagcccgtcccggcgatgagcagctgagctcgtagagaaaggaaggccggcctgagcggtcgccaaccatgccgttctgagactctgcgcgatggggtggagggcgatggatgaaacgaaggagcgaatgaagcgccttgcgacgcacgctcgagtcaggagaaggcgacgaacaggcaggaaatgtcatcgctctgacacggcacagccgatgtcgcgaaggggcggagaggagaagaaaagggaaaactgggtcgtaagaatcgtaagcagcaggagtcggccgcggagcgaggacaagctgcccgagcggtcaagtcgctgagcgctaggaacgcagaggaagatggctgtcgcagcggggacttcgatagcttagagaccagcactgcccggtccgaggtcgcgggtgaagaggttggaccgctggcggaggcagcagctcgagtaaaggtcagcctgctgcgccgacgcctcctggcagaccgagcttcgctctcagcggtgtgctgcgacgcaccccaaagaagacctgcacgaggtcgagcgagtactctccgagctcaaggtaggccctggcgacctctgagagattgcagtaaaacgagggctgggtcatcagctgtattcaggctctcacgagcactcccgctcggacgggtcggaactcacggcgcaggtccttattcgggatccggtggatggcaggactgcgagcgagcgggatgaggaccttcacacagacgcagcaaaggccagagcaaaggcgggacgtacgtcaggccggtcgaccgcttaaggccagcgaggaacgccgacacgagccaggcgtcgatggcgaggcggaagatcttgcacgaccggcagtgaggtggcggggtgtcagcagtctgtcctcaacagggcaacagctcagaccggctgaaccacaccgagatgccgaacatgctcgaggtctgttgaaagagcgacaggcgaggcgagcagagagggtgagcgttgccggcacgaacgcaggcaggcgacaggccgccgtttcgacactgcaccgtccggctctgaacgctcaccctctgtcccctcgggagcgcctcgactcgccctaaagcagctcagccgttactggagagttgctcctagagtacgtcgttgaccctcctagcatctgggctttaggcacgctgacgacagcgggtagtcctcgccacagcagcgctcaccgacctcgagctcgtgccggcgcgagactccgccctccgacctcatctggtatcggacgcacttgtcaagctcgatcagacaattttgtgagcgctcgggcatcaaagctagaagagctaggccagcttgccctgcttccgtggtcatacagctttcaggactgacgcttcgttcggcacagctcgccgcagcgctcccggacccgaccgacgcctctccacaccgccccctggacgcgcccgacccggctttgacccattgctgaaacgatgtcgtcttccttccctttccggcctcaggcgtgagtctgcttgcatcctgcgacacgtccttgcgtctactgctgatcgactgcctcgacctggacgcatgcagcccgccgttccggccatttgtgccgcggggcatcgcacgtacggaggacagccagccgcaggagtcggtcgcggcgaaccgtcggcacacggtcccatcggtccgctcgacgccttacccgatgggagaacggtcgaagcagggtcggccgccgccgccgagacagatcccttggctgcagcaccagaaggcaccgcggcctgcaccctctgcgccaaaggccatgcgtccgtcactggcgatgagaacgagaccgccgccaccaccagcggtctctgcaagcgtctccctctcggcccttgaagaacaggaagaagaggcactgaacggtggcccatcctctgcgcctgcctccaagactccctacaaggtgccggcccaggacctgtccgacgagcaggtcaaggcggccaaagaggcgaagaaggcgtgcacaaaagctcggaagttagcccgcagacaggcttctcaggatgctcgggcgagtcgggccgctacggctgccgacgaggaggctgtcctgcgggttgtcacgccgccgtcgccctcgcccgcaccaaatgccgggccgtctccggctcgttcggccccaaggccatccgaccctctggccgataatcagccagcgctcgcgatcgccgagatcaagatggaacccagtcaacctcctgtcagtcgctcccctgcagagtacttgttctgagccattttgactgaacgacaactctgtgttccttccgcagaccctttccgtcccgatgccaaacagtcgcgctgcgtcagtaccgagcggaacggtcacgtcgcagccggcacgcctcgtctcgcttcagccgacgccgatggtcgtcgacctgcccgacgtcaagcctgacatccagctcctccggcggtcgccctcgccgcctgcggctcccgcgccgcgtaatccaaaatctggcgtcgccagctggacagaggcagaactgccggctgattgcaacctgcgtggtacggccaaccagccggcccgggacaaggcgcgccggcagttccggcttcggcaaacgtgggagcttgcaaacgagcgccgactcatcacccgcttcaagtggatctctggcgggctagcgctcgattggtcactcgagaagtcgcacggcacctggacgcggctgtacccaccagaggtgcgctgcgctacgccactggtccggcgacgcttcttgaatgccgaggtccgcctgatcgaggccaagggctggactgtcatgctcgccgaggaaaagttggccgacgatggctcagccgtcggcgtctcggtcgcctggctcaacgacgcgtgcgagccgtcgccatcgtccacccagcctcctcctccccggccatcaactttgtcgccagcggtggaaagtcgcccatctgctccttcggcattggccaatcagattgtcgaacgcgccaaggtcatcgtcgacacgtcgctcgcactaccgccttcggccgcgccgccagccgcaacccggctcgtcgcgcgcgtcaagtccgagccgatggacgtagataacacggccgtccctccgccgccagcgaggccgccgcccaccaaatcatcgcacgagacgccacaactgagcgttgccgttcggcgagacgtagcgctgtcgccgccggcaccgccaacactaccagcactgccaccgccactgacgacaagagttgagcccaaagccgagcccattgtcgacgccgacccgatgggcaaccctcttctcatagtctcccaagcagtcgccgtttcgcagcgcctccaggctgtcagcaatgaccgacaagatatggcggcgatcgaggcggcccaggccgaggtccggctgctcctctcgcaggctggtgccgtcctcaaccgcctcgggcacatgcgcgacacggttgccgagtgcgagcgaacgctcccatgacctgcaaccgcccgccgcttctccacgaccccccgtttccataccacgaaacccgcactcgatccagcaccgatccccgcacgaccttcatgacaacgcccgatctacatgcctcacgatgccgcaacatttgcgcagcgcagacaggccaggcgaggcgcaacgaggaccgcatgtaatcctgcctagagggagaagctgaaaaaacggctccgctgagcgccgctgtcagcgcctccgccaggcaggccgattcgcgcggccagctgccggtactggagcatcgccaacttgcgtccgcgcagaagcatgacggtcacgccaacgataaagaagagcatatttgccgtctgcgaggggtgatgggggaatatcagcgggggcggcgcttggtcttgagaagagcacttggacacgcggccggggacgcacgacaaactcccaataatcctggcgctccttcaggacgaccttgccgcatgcctcccaggccggaatctctttctcgtggaagttctccccgccctcttctatcggcgtgatgtcatggtgggcatgacccttcgggacgcagtgcaagaggcgacggttgccgtagggctggcagaagggctcgtggcgctgcgcgaacggccgaccgacagggtcgagcgtcagcacctcgcacggctgcaagcgggcagagcacaattcgaggcgcacctgggatttcggacacggctcgcactcgccaaacggccggcagtcgtactgctcgtgtgacggcagctcgccagctcggctggttggaaggcttgccgtggaggggcggaggaccgagaggaggacaagcaggaggagcacccagcggttgctgcgagcggcaaacgcggcaggagcagcgggtcagtggtggtgtccaggcgacaaagccggctcgacgaacagtagagcagacttacgaggagatggagctcatggcgagccgagagatcgtcggggtcgcgagccgcgagctgacgtgaatctgttgcctgagtacaaggatcggcgttggcgcacgagtccgaggactgaaaggcagaacgaggtccggatgcagggttgcagaggagctgagcggaaggcagatgcagggagacgattgtcgtggtcggtaggcaagcgcggagggagccgcagctgacgctcatgagccacgagtgcgtcggcgaacgaccggttgacgagtatgcatgcagagcacctggtttctgctcgccagtagccagacctgttctcttaaagaataaactacgcctgccgagtctctgacgagccggactgccgagccaatcgagacgagaagacatcttcaacccgtgaacggcttggtgccgtgcgtccgccggccgctctgcgggcccttgtcgctccccaggtactgaggcaggatcgtctctgccggcgtgaggatgccgctcgtgcttcgcggaggcggagcagacgagacgctcggcggcgggaatgaggcaataatgtcggcgaacgaggcgtgcgtgtcggccggcagcgggtcctgaacaatgttgttctccttgagctgggcaacctgagagcacgactgggtgagcagagcctcagagcacggtagggaaggcagaagaggacggacctgcgagcgggtgacggtgaagaggttttcaggcaagcgctcgaggactgcgccctgaaccatcccgagcgcgaacggcagcgagatgatgggccgtgtgagctctgcgtgctcgagcgtgagcttcattaggtccttgtaggcgtagactaaggcaggggcgaacagggatcagcaggaccatcgctatacaatgatgcggtggggaacgtaccggtcgggccgccagcctcgacgattttgccgtcgaccaacgcggcgatcttcgcgtctgacgggctccggctgattacctcgatggcccgagcgatgtcgcccgcgtagacctgcaccgtgtgaaggatcagctcgagaaacaaagggtcaagttcgaggccaaaacgcaccggctgaaagagcgacttgccgccgccgaatactggcaggaagggcaggatcttgccgagcttggcgaagcgctgcagcagacataggtgtcagctgatgaagtctgaaagcattcgtctcgctgacgcacagtaaagaaaccgtcgcccgggccaaagacgagactcggacgaatgatggtcgccttcgtatcgatcgacagcacggcctgctcaccgaggcccttcgtccgccagctgcagcaaattcaaggatgcgtcagctcagagctctcgcgccgaacagtcggcaaggacgcactaattgatctccgactctgggttggcgccgatagccgagatgtggataagctttgcgccgacgcgctgcgatgcacgggcgacctgtagggtgcaggtaggcaagcagggtcagcatcaggctgtcttcgcggctctatgagcgacttacgttctccgcgccgtgccactggacttggttgaagacgacgggcgagccgtgcatgatgctgcggaggcgaaaggcgcagctcgtcagcgcgagcccagcggccgtcgcggccgaatgaacagagcaatcagagcgcccatgctgaccctacgaggttgatgacggtgctcgcgccctctaggacgctctcgaggctgccggcgccctcgccaggccgagcgatgtcgatcccgctcgccggcggcaggacctgccggccgaggtgcttaagctcgccgtagcgccgctcggggttccggctcccgagtaggacctcgttagacgacgagacgccgacgagctggcgcgtgatgtagctcgcgaggaaacctgcaccgaggatgacggtccgctgcttggggttgctcgagccagaggcgaacgagacgggcgaggacgagggcatagcgaccgacgagtggccgggcggcgcggtttaaggacggcggcggagactaggctggaagaggagagaggcgagctacaggtagcgctggatagtctgctgatcttgctgtcgaggtggtcgataagggaggtcgagagagatgctgctggtcgttggcaggggcagtacgagacggcttcgggccgcgatcgacgatgccctggacgtcattcgatgcgtacgaggtcgacacctgtccacctacatacgtttgcgagcacagatttatctaggagacagaccacgagggtagggagcgcgagtgcgctttgaatgtacctacagaagcgagcgagggagagaggaggagtcgattaggggctcgatgtacaattgcaaggcgtttgagccggcgccgttttttagggaggagagcaaggttgcaggggcaagggattctagatagagagggagtgaatagtcgggagagaagcctcgcaacgactcagccccggtggtagccgagcgccgagccatcggccgttggcgaagccggggtcgcccgctctgcgtcggccttcttgtcgtcgtcgaccgagtgaatcgtgctgtcgtcgtcaaacgtctcaaaaacgtcttcgctgtcgacctcgccgaggccggaaggaggaaagagcgtattgaggccataccagagcgtgcacgaaacggcccagcctggcaagttgcgtcggtgtcagcttcggtctaacgggcgaggagcagatgcaggcaggtggaacgaaccgagcagccagccgaggtaagagacatggacccagccgatcggaaccttgatgctgccgctgctgacagagttgagccagccgggcaggcacgggaagacggcgagtgcccagacgccaaacgcgcggaagttgaagccgtgcgtgtaccagtagatggagctgtcgttggccgtgtagaggtccgacagcttgagcttctgccggcggatgaggaagtagtcggccatcatgatgccggcgagcgggccgaggaaaatcgaaaagccgctgaggaccgagatgaaggcgttggccgtgttgaggaactcccacgggcacaccgcgaagccgacgatagcgacaataaagggtccgcgcttcccgttgacgtagcgcgggaggagggtcgaaaggtcgatcgagcccgagatggcattgccagcgacctgaggacggagcgtgagtcagcaaataggtcgggcggtgacagcgctgaaaggtggacgcacgttgacgcagagctgacgaacaaagaaggcgactagtgtcagcgattgaaaaagaagacgacagccggggggggggggggggcacgtacctgtgacgtcacaaaggtcagggcgaggaagaagatggcggcacgagcaccggcagtgccctcctcctcctgaatgacttgcatgagcttgtagggccgccagaggaggccgtgctcggggtagaagccggctgcaggcagagtgagcaatttgagtcagccgataaggcctataatgaaggtgctcgagcggcgagaaagagacgcaccggcgcaggacgtgacgacgaggccgattaggcttgagaggaccatgcagaccgggatgacaaagatctggccgaggacctggtcgccctcgcgccgggcgtagcgggtgaagtcagactggtacatgatggctctgatggagggaggctgtcagtcggcgagtgtcatcaatgagcaagtggggtcggaagaggacgcacccggcccagccgccgatgcccgacgacacagacttaaccatcgcccagccgagcgcggcacccttgagccgaggcttgccgagcgtcttgctgacgtcgagcaggagcggtccgcccccgccctgctttgcgagcgcccaaatcatgagcgcgagcacgccgaccgtgacgcaaaccgaggacaagacggcggggatgcggtagcgctcgggccggatggcgaggatcgggagcgagagcgtccagaagaggacaaagcaaatgaggtcgttggtctcgaggtgggccgagagcgggagggtgttgggcatcgtgtagaacgagggcgcccaggtgccgatcatcaccttgatgacctggccgccgagccacgtctggtaaccgtacctgcgccggcgcgatcgggacgttgtcaggaccagaccagctgcgctgcgtctagaagctcgagcacagctcgcctcggcaggcagcactcaccagcagaacgacagaatgagtcgctggcagatgacgaaccaggcgccgcggatgccccagccggcgcggttgccgacggcaaaggggatgtggtacctgcctccctgctggccgttggcgacgagcgcacacccaatgatgacggacgagatgatgtcggtcacgacggcctgccagacgttgaggccctgtcgggtaggttccgtagccggggccggagtcagtgccggggaggttctcgctcgatcgctcaacgaccacacgccagacgtacgagcgagaggacggccgaggcgcctgtgagaccgccaatgttgatcgaggttgccatccagaaccaaaagaaggtcgacttggtccaggtccggcgtgaggccggcagcggccggacgtcgtcgttgatgtagtagtcgtgctcgccggggacctcgatggccttgttgagccgggtgaggagcgacatcgcgggcgggcaggagctggcagagacgagctgtagaggggcgagattcgctggaggagagctggtggtggtcgggtgagaagcgataggccggagcggaggcaaggacggcgggtgggctgaacgggggagcggcttgcggcgggcggttggtcggcctttgtagaatcgctcggtcgttctctcttgcggggttcgctggctcgagtcagagcgcgatctcgctcgctggggcttcgctggcgatggtgatggtcgaccgggtgcggcagacggccgccgcccttctgcctgctttcgctccctccgaacggaagctggtggggcaaagagcgaggggcggctgcgccccgccctctgcgcccgtgcgcggccgaggagtccgaagagcccgtgcgctgctgctgcttgctcgactgctcgactgttctgcccaacgcaatctgcttccatcctggcgtgccccaaacataggctcgcattgctggggagaagaggttgcgtcgactgggccagatctcagggtcggaagaagacggacagcgctgctgctgcttggttcctctcgactgacggcggggggtctggccttgcaaggcgagtaggcaggtggaggccagggacgagccgggcggtccgggagcggtcgactgccgcatgccagcagcgccctccttgagagtcggcgcctgttgccgaatccgctcaacgcgctcgtcataagcgaaagaccaagagcccggtggccagcagccgcctgcacgctccttccctcaatccccatcgcttccccgtcacccagcgttcgcaagcagccagcgttttagctcatgaatcgtatcacatcctctgctcccagttgctctccgtccgcgggtcggcgccaaatttactcggcggcggcggtggcgcgggtgtaaagctgctgggcgcggtggtggatgatgcgcttgatgaggccctccttctcgaggtacttgatagcggcgcgcgcgaccgagccgttgactgagagcgagagtgtgcggaaggtcatcaagttagctcgcgagcggggagcgtgagcgaaagagtgaggactgacccttgtgccggtcaatgaggaccgactgggagatgaccttgtaggtcgggacctccttgatgatcttgtcgtaggtcggcttgtcaacaacgacggcgttgttggcctgggcaggagaaggagcagcagcaaggtcagttattcgtcgaacggcggcagcgcagacacgcaaggcccggtcgggcagggagacggtgtacaaaccttgtcctttaccttgcccttcgaccacttcttcttcttctgggcctttccaactccggaggcggctttggctttgggaggctgaggagagaggaggacaaagagaggtcagcctgcggacacgcgcagggaaggccagtcaccacagggccgcaggagcaacatagcaagcaattagcagttgcagaagcagcagcaggcggcaggtgacggtggcaggtggcgaggcgatgtgtcgagatgtcgcgtcgacaagagtggcgagcccaagcacgtcgaagcccggcctggcacctccgcacagtcacgcaggtccgacccgaccaagccaagccacccagctcgttccagcctgagctgtatccggcccctccacgtcgccaggaggtgcagtgtggaaggcgaggcgaagaaggcgcccggcctaggccgagccgccagcgccagcgcggtaggcgagcacttcccgaggtcggccggaacgaggtcgatgaggtcggccgatcaagacgagtcgcctgccatggcctgccagcctgccgtcgtcgtgctgcgtgctgctgctacgtgctgctgttgcttgctcgctcgtgtcctgcgagagccctgtgaaagtccccttggactggggcaagaaggggaggacgaaccatcttgaggaggtgactggaggtagagaggagcgaacggggccgagctcaggcctggcgcagcgggcctctctgcgccggcgggcgggcgcgcgtgcggcggcgcctgcggtgaacctcaatgcactgagaagggttcaatgcaatcaagcgtccttcccgcgaaggtgcgggccgttttcaggaaccgaactaaagtcgaatgccagagcccaaagcgagcccaagtcagagggcgcagcggcagtcgccttcggaagctcggcctctccgccttcgctcgcagcttgaccgtcactcgattcatcaagtcaccttccgtcagtcctccttggcaggaccgttcggattgcggccagacggctgatcgtgtcgctgctcctcgaacctttgatcttgtcgccgttgtcgtcgtcgtcgtccggccgttccttcggccgcaaaccccgtgtgctcgcgcgcgcccgactactgcacgaccaccgactctcctccttcccgctccgctttcaatcccccaacagaagttagtcttcgacctttctcttctgggcgctggtgtgcagcacacggcagtacggagctgcagcagcagcggaccggcgcagcggggccgcagtcggcctcgagcatgcgcacgcagccgcatgcggccgcaaggcactcgcgcgagctcgaggctggactagcttcagcttagccgacgtcttcgcggcggcacggcatgcaggcagcctcttggcctctgcgctgccttcgcatgggtggattggttgcatctggatgggctgggatgcgttggctgtcgctgcccgagctgctgcagctccgccctatcgtcgctgcggccacctttccgcttccgcctccctcaaacaccatcctgacccttctgcctccctcccatccctccctcagcatgtccaagcgcacgaaaaaggtcggaatcactggaaagtacggagtccgttacggagcttcgctccgtaagaccgtcaagaagatggaggtctggcagcacggcacctacgtgcgtctctctggctgctgtcgccctcccgcgtctcaaaaagcaggctgacccgcccgctgtcctccgctcgcctctcgctcagacctgcacctggtgcggtaaggacgccgtcaagcgcactgctgtcggcatctggaagtgcaagggctgcaagaagaccgttcgtccctttccctctcttcatcatgctcttgcagccgctgattttgactgctcctccgtctttgtctttcttcagaccgccggtggtgcttggcagctgcagaccacggctgccctcaccgtccagtcgaccgtccgccgtctccgcgagctcgcaaacgcgtagttggggcctcacgattcatgccagcttgtgaagaagatcttgcgcgcgccgactgggtgtcgcacgctttaagaagggccggagtttgtggcagggggggtgggagaagggtggcgggtccgacctatgaagcacgattgaagagctcgcgcatcctacgccagcgagcggttgtccgagcgcaatcgtcatcgtagccagctacgccaggtgctgcgctcgaggggaaacgccgctctacggccagctctcctcgccctccttgaagtcccactcgcgccggccgacgcccccgcccaattttcgccacgcgtcgagcgctctcgccctcctccgctctgccagcgcacagacgccctcctcgcccatccagtagccggcatgcgtctcggcgtcgtacgtcccgaagtcgacctggccgccaaacgaccgctcgacgtgctcggccggcgcgaacgaggcgagctccgaggctgggtcggacgggaggttgagcttggagcgcgtgacggggtcgagcaggggcgagatgacgcgaaagaagcctcggatgaggaagggcacattgatgacgtaggctgcgggcaggaggcgaggtggtcagtcggtgcgcgcgatatgctcgacgcatgatgaggcagacgcaccggtgccgagccgctccgggtagtgatcttgcaggctgcgatcagcgaatagggcgaaatgtcagccgttgtctacctcgcctctcttcagcgaaccggctgcgccgggacgcacatgtagaggacgcgcttcgacgtcgccatgcttgggctcttgccgcgcgcgccaaagttgatgaacaggtcgagcttctcgaccccgcgcggcatcaggttctcggccatcgtcatgatgtagaagacctggtgaagctggcgctccgactcagccgtgttctgcagcgccgggcgcatgtctgtcgcgagcgcacgtcgaaggagggggcgttcgctcgtcagctttctgcaaggcgcgacgggagaagcaagggcggacgcacaccagatcggtcgccgatcgttgtcgtagccataaaggacctgcttgcccgtctcggcctctgggctggggtccgtccgagaggagggaaggcgcgtgtcagctgcgcgcgcaacttgagcgacagtcggcagggccgccgtcgttgccaaggccggctgaccagtctgatcgccaacctttgccagaccggcagaacaaaagggaccgtttacgcacgacaggtactccctcgtgaagctttcgacgccaaactcgcgccgccaggcgagcgtctttgcgagccggtcgcgcgcctgggcctcgtcccactttgtcgcccggaggaagcgcaggaagcactcttcgctcagccaaaactgctcgccctcggtaaggtgctcgctgtaggcgatcggcttgcagtgctcgggtaccgagctcgacgacggagggacggcgaccgtcaggcttgggtcgctgaagtgggcgatgaggctggcgagtgcggcctgctgcgaggccgtcaggagcgagcggtcgaacggggccgtcgccggcgggctgagagccgcgaccgggtgagccggcggaaggatgacggtcatgcggagagggtgctgggagagattgctggctggctggacggagttgctggtcggcgtcgaacacagacaggcgcgtcggtcggagggacgaacggggctgacgaaagcgcgcggatcggcggccgccgcctcggcgacgccagagaggccggccgagcaagggtgggcaagggctacaggggagcaggagcagagagcaacggcgacccctctttactgctcttgcctactcgcccttgccaccgactctcaagcccatcgcatccgtgttggcctctgtcgacccgactcagacgcgatctcttgccctgctgctagaggcgacggccgccgcccggaaccgcctctcaccccgccggcctccgactacgaagcacccggacgtccaacccggcccacctttacctccacaatcacccagctcaaggcccgcccgcccgcaagcgcagccatggccgaccggctgcccgccgacgacacgggctctgccgccgacgaggacgacgacgactttgacgaggacgacgacgacgacgacctcgacggcggaaaggatgccgagggaaggccgatcttcctcaaggcgggcgacaaccctcgcaagacgtggcgagcgtgtgcgcatcactctcctccagctcctcgctatctgtgctcccttgctgacgagcggcgctgacctccgccaggcgacctctgccggaagcgcaaggtacgccgtcgggccttgccggctgctctgaacgaggcgctgatcgtcccacttgcccttccctcagcaacggtgcaatggcttcgagatgcccgaccaccggtgcacggtctgcatcaactcgaaccagacctgcacctacgtcgaggacagcaagaagcgggcgccgccaaaggggtgcgttgacgttgcgccggtcgggtcgatgccttcttggcctgcgccggcagtcatgcctcgccgagcaccatcggacctgactcgcaggttgctgacagttgtgttgcttctctcctatttcgcttgtctctcacagctatgtcgaatcgctcgaggcccgctgcaagaaggccgaggcgcttctgatccaggtacgtcgtcgctcggccatggcccacgctgcggatgctcgcgcggccagatcgcttggcatccatcgggccgccggtgcttacgcggcccggtccctctcgcgcagctcgtccccaacttcaacctctcgaagcaactcggcccgccgctcacaaaggagaccttctcgcgctcaaacaagaagggtccagtgcccaaggctgagcggctcgcgcgcgagcagcagcgcatcaaggccgaaggcctgaccggcctcggcttcgagggcgtcccgttcgctcccgacggacgcgatggcggaggcgtccggtcgagctcccacctgagcgaacgcgggccgggtgtcctgctcccgcctcacctggcagggaccgcgccgccgccgtcggcgtcgacctcgccgttctacggccagcacccgccgcatgcccagcacccagcggtcgcagggtatcctgctcagccgccctaccccatgggccctccgcatccggcgggcccgccgtaccaccctcctcacgctgctcatccgatgtacgaggccgactactctaccgttggctaccggggcccgccgccgccagccgtcagcgccgaggctgccgccgccgtcgtcaaagccggccgtgagcgcgaggaggaggaggccgacctcataggcttcgtccagcttgcgcaccgcgacgagcagctcttcaagcgtttcatgggcctcgtgagtgaccgtctgccggctcgcgcgtcgcgcgatgactgacacgggccgtcctttcagtcgtctggcctacccatcatgtactcggccctcggcttcaagtatggcgcgacgccggccaagtgtgcgtccttgcttgctcatccatctctttccgtcagcgctgaccctcgctcgtgagtgactcgcagtccacctcgagctcaaggcccaccggacaacctcgcgttcgcgcttctggcggatcccaccctgggagtcgaccccgacctgcttctcgtcgaccgccgaccctgccgcgcccgcggtcgtcacccagacgccggccggccggccgccctgcccgcagctcgcagcgatgcgcgaccagaacccctttgcgagctggccggctgctgagctggcctggaagctcatcgccgcctactttgatcgggttaacattgtcgtcccgctcctgcaccggccgacgttcgagtcgtaagttcagtgtcggcttcttcgtgccacggcgtcgatgctgaccgcctggctgttgtcgcctaatgtagacgctacaacgcccaggcgtacaacacggaccccggttttgcgcggacgtgcctgctcgtctttgcggtcgcgagcccgtacgtcgacgacgagcgcgtgctgttcccgaaggaggacggcacaacgtacggcatcgactcggccggctggattgtaggttgcctactcgcgcttctccctgctttcaccaatctctgactgacgcatgctcttgcttgatacgtcgccagtactggcacggcttcggccgaatggtccgacaccggctggctccgaccgagttgtgcgacctccaggtcgccgtcctcctcgtccagttcctccgcaacagcagtcagcccggctcgtgctggatcattgtcggcgagggcctccgctttgcgcaggacgtcgcgattcaccgccggcgggccaagcggtcgagcgacccggtcgagaacgagcagttccggcgggcgttctggtggtccgtctcgacgtcgcgcaaacgacgatgaccgggctgcaaggctgactttttgctcctccgacagcctgtatgcgctcgagcgagaatggtccggctttctcggccggccgttcctcctcgcggaggaggagtacgtcctcaacttttatatcgactgctgaagccgaagctaacttcgtccgcccttgcccttgcagcttcgacgtcgacttgccattcgagtgcgacgacgagtactggcagacgggcagctcggcaaccaactttgtccagccggccgaccaccagccgtcgcgtctgactgccttcatcctgacgctgcagctgcagaagatcttctcgacaattcttagggatctggtgcgtgcggatgcacggcggcagcagccaaccattatggcggctgacgtccctcctttcctccctactggcactgcagtacaacacgaagcgcgcgcgcggccggtcgcccgccgagatcgtcgaatcgctcgagcagcagcttcaggagtggctcaacgtcctgccgccgcacctccagtgggacccaaaccagcccgaggacacatggttccgtcaggcggtcgacctccacctccagtataacatcgtcctcgtgcgtgctgagtgcgagctacgtgcctctactccagctgacctcgactcctcaacccgatcttcctcaagacgtacctccaccggccgttcctaccctcgccgcgcaagccgacgacgtcgtccccgagatccttcacggcttgcattagcgccgcccacgcaatcgcttcgatcctgcattgccattggctccggacgcgcgagatctatctgcacgtcttcaacacggcctacgtgagtatcatctgagctcgcacctgatgtgcctgcgctgacgctctcgcccccttgcagactgctgccctggtcctcctcgtcggatactggtcgacgcacgggagcgacgcccaggcagcgctggcctcgttgacgaagctcgagggtgccatgggcgaaggagagaaggtcttcttcggcattggcagagcaaggtgcgtccgcttgtgatgccgatcctcgcacgagaagtgttgctcacactcgaccgggatcgacagggacgccgttaccgtgctcagcgccccgcggatcgaggctgcgtcatcggtcctcggcgcgaagcgcaaggcgtctactggagcggcgccagacgtacccggtcaaccgccgtgggagtctcgccgaccgccgccgccgactgcgtcaaccgccaaccaaggagctccaacgggtcagtcttcgacagcgccgcacccgccgccgcctcctccgccgcgcttcgcgccgccggctcaggccgcttctggcgcgtatccagcgcagagcctgccccagggctacgttcgggcgcattcgcgcaacggcggcgagtggggcgacccgacctttggctcacctcggacgccagcctttggaacctcgccttcgacctcgcagggcgccggctccgagaacgactcgctccaccttggcctcttcccagactgggagaccggcttcgccgatccgaccatgacgctgttcccctccggctcggccgaggactattggcaggtcagtgggcccgacgcccagcagccgctcccggccggctacacggccggctacccacctccgccgcccttggtcgacggtcgctaccctcctgtgccgccgaacgggcaccctcatccgccgccgccaccgatgcagagcgcgcgttcctcggttgcccacccgcaagagtacacgcaaccgccgcacgccgtctacccgccgccgccgcccgcgcactgatgaacatccaccctttagaccccgcccgttcgtgacgtctcttatgtaccgcttctgatgtctgttgggggccggcggaagccgaaagtgagggcccggaagcagagacaggttggtcaagcgagttgaccttccgatcaggccgctgggtgagcagagccggagggactggaacggggcggagtcgtagcttcgtggccttgccgaagcacccgttagattcgggcgactctcaacaccccctcttttcattagcgtctataacatgtcattctagatcagacctctctctcgctccgcgccgcttttgcctttcgctcggcctcctcttcctcgagcgagcccggcagcgggttttcctctattggcagaagcgaggcgagcagaaggatagccaggccaaagatgatgacgaagatgacgcggagcgaggcgagccagctgtcggtcgcctggcgctgaaggtctgccggcagcgtgagaatgtatattgtcgagtctagaatctttagaacgatctgcgagaggggaagagcaagggtcagtctcctggctgagcgaccgacttcgacacggaagacgcacctgctcgtcggctattctcgccctcaggttccgctcgagcagagcctgaaggagcgtggctgagagcgagacgcccaggacctggccggtcgtccggaacagatatgagactgatgagggaccgcaggttggcctgtcagccggctgcagcggagtgaatagagcaggagggagcatctcacctccggtggcgaccgagatctgttcgcgcgggacgctcgagaggagggcgacgagcgtcgtcgtgaggacgcaggagaagccaaggccctgcgaggcaaacgggcgcggtcagcggccagctcttggcgacttaagacagaacgtgagctcaccgagggaatgagcgtcagatagagcacccattcgggcgtgtcgtagtcccaaaaaatgaagatggcgctcgaggtgatgatgcctgcagcgtggcacgacgtcagcgacgtctcggttgccaagcggcttcagagggaccgtaccgcaggcgccgacgatctcgagccagtagtacctgcccgtcttgcgcatgatggcgcccgcgccgagcgagccgaccatgatcatgcagctgtttgggatcaggtggctgccagcgttggctgacgttcggagcaggacggtgacgaagaactgacaggacgacgggtcgtcagcaccggacgcctccgatcaacccgaggactgcatacgacggaccagcgggacgttatacaagaccgcaaagctgacgacggcgataatgaggttgctgagggcgacgaagccgctggtccggcgtgcgaggaggccgagcgggagcaccggctggaccacccagctctcggcggcgacaaaggcgatgaggctgacgccgcttgcaactaggaggccgtagatcgccggatcgctaaaggggaggcgcgaggtcgtcttgaggctcatgctggaggtcggccgatcagtacgtgcgacgttcgacaaggacgacgctagcagactcacgcgagtagcaacgagccgatgccgccgacaagcgtcaacgaacccaggtagtcgatcctagaagtcgaagcacaaaggcaacgtcagctcccactcgctctcgagaacagcagccccccacccgcttaccgcttgaccttctcccagccgctggtcggtgaatcgaggaacgacttcggctccttgcacttgaggaagatgaggagcatgccgccgatgaggagcggcgattggcagaggaaggcaatccgccagccaaagttgtcgctgatgtagcctccgaggggcgcaccgcaggctgcagcgacgtgcgaaggagggcaggtcagccgccgcccacctcagcagatcgactagcgactcacctgcgccaaggccgaagaggaggttggtgaagccctggtagacgccgcggtccttgagcgagacgtggtcgctaacgacgatgctgttggtgacggcaatgccaccgccgcccatgccggcaatcaggcgaaaaaggaggagctgacgcatcgaggtagcgcagccgcagaggatagtaccgccgccgaacagccctgctgcgagcatacatgaccagcgtcgaccaaggatgtcggagagccggccgtagagcggcgtgaactgcggatgaccggaaggggtcagcggacgagcgcgaggggtagcgaggctgcatgtcacacacgcacgcagcaaaccgagagcagatacgacgtgccgatccagcccgacaagcgcatctcgttgaaggccgagccaatcgttgaaatcaaggctgcgagggcgacgagacgcaggggtcggctcgagcgtcagccaacgcgccgacgagcagaagcagtctcagcgcctctgtggatggccgggatcatcacgtactggcgacgatcgtgccatcctgtagcagcgaggagaatcagcgtcggcttgaggtcgagagaagggggaggcgagcccagcgaccggcgcttcgggcggcggcagcgggcgggggggcacgccggggacaactcacgagggacgcgatgaaggtcatcatccagaggccgactgccagcaggtcaacgagcctgtcaaccccccctgccagcttggcagatcctgccgcgagctcgacgcacccatcagcaagcgaaagtcagccttggagattgtctgcccgtcgtcgccgtcggccgcgcccggcggcgggacgacgacggtgcgctcctcggctgaggaggacgccggcgagcccggcggcggcggcgagaggagaggcgtgcgctcgtccgtcatcagttcgagtcggccgtggcttgcgtcttgtagagtggaaggggggggggatgagggtgaagagggagccgacggtcggtcaaggcggctcgtctttcgcgcctccgaggtcggccatgtccgtcggcgggcgcacgtcagtcgtcctggcttgctcgctcgcctgcctcccacccgctctcgttgccttgaggtctcgcgcggctggcatccagacgaggaaggcagagagcggtggcgggcgtaagtttacaacgggaggggtgtgaggcagcgcagagaggggtggagggcgatacagcaggggtggggttgagtcaagagggcaggatgggccgaggcacgaagggaacggaaaggcggacgtctaaggtgggaaggcggagggttgaaggaaggcaggtctgaagagggccccaggggagaagcagtgcgaagagcgttggagggtgtcgacagcggcggcgttgctacgcgccgcggcacgtcggccggccggactcacgtcgacgacggcgctggtgcgctcgcagtcgtcgttgtcggcgtcgttgccgagccgtccgccggcgcaggagtgccgctcgccgcagccgggtcgttcgcggccgtcgtggcctcgcgcgcctgctgctgctcgtgctcgaggagcgagagtcgcatcgcctccatgagcatgagctgcaagccagaaagcagcgacgaattgtcagtcacgtatcaaagagcagtgcaaagaaagacgacgcagacgcacttcttcaatgtcggccccgccgaggcccatgttgttcagcagccgctcgacctcgcccgtcccgccctgctgccggctcctgcgcctggatcggccaggcgagcctccctccgcaccatcgccgtcgcctccacctccgagggcagcaaggttgatcggcgcgattggatcgcgggacgaggtgatgccgattgggatcaggcggtcgccgacctagaacggcaaggagcaggacgtcggcggtcagcttaatccggcggacgacctcctgaaggtaagcagggcgacgcacctggcgcatgacaatccgccgattagccctacgagcaacggtcgccttgacagcctcgagcttggcttcccagtcgggccgaatttggtctgtcacgagaaaccaaccaaccaagcggatgcgcagtcagcaccctaccagcacgatgacaactgctcaaagcgggagaagcaggacgagacacgcaccgacagtgacgacctgcttctccgtgtgcgacacgctttgccgccgcttcttctcggcccgccgctcgttcgcctcagcctcgggcaggtcgaagccgctcccgttcgcgccgtcgtcgaacgcgcctccgccagcgccaccgatagcgctgccggcgccggtcgcggatgagatcgccgtcgcgagagctggtgagccactgttgggcgcggtcaacttcggctgagccggagcggagagagggtgtgagggcgcaggtcagcgatgaggctcgcgaaagcaacgacaggtcgcaaggacgcactctcggccggctgtagaggatgccgaagttgggttccatgcagaacgggcagcaagccggctccgactcctacaagccgccgggaaacgggtcagtcatcaacctgagctccgcgcgcctcccgaggttcgagcttgcgtgagcagagacgcacgagatgggtcgccgtcgcctcggcccgcttgatctggacaaagcactctgtgcagatcggctggtcgcagcagcgcgaggcgttgatgttggccgggtagtactgcggggcgcagtcgtcgggcaggaggcggtgtcagccatggttctcaccgtccttgagttcaaccgacagagcggctgagctcttgagccatagggagggattggaagctcacgaggaagcagctgatcgagaaagagccgaggaagcaggcagggaagtcagcgacgagagctagctgagcgtgagatggtccctgacagcgcgcggagacaggtctacgagagaggcggacgtacagcgggcactctgccgtcgaatctgtgaaccactcagcctcgcggcgctcgacctcggtcgtcgccccctccttgagcctcgccggcatcgccgccagcgccgccgccttgttcgccgagaggcccgcggccgggtcgacctcacccgtcggctcacccgcctcgcgcaacacctggcgcttcttgtcgaccgcgaagcgcgcctcgcggaggcccttgacgatgtcggcctcggcccagtcgtcctcccagtcctcgaggccgaggtagaacggcgccattcgccggtcctgaatgagccgccggacgacctcgcggctgaagtcccaggcgggtgcgagctggtagaggccgagagggagcgtgtggccgccgtcgacgagcggctcggacgcgagcacctggctggctgtcaagggcaccgacgacgacttcgtccgcgcccgggcccgcgacgtcagcgaggcaaaggtcgacggggccgaggggccggccgtcgtcgagcccgaagcaccggcgtttgaagccgaggtcgatccagagggtgcggtcgtcgaggtcgagccgcccgagccggaacgggtgctcgaggagggagcgttacccattaggaaggagagatccggaacgaaagggaaggagaagggaggaagtgcgaagggagggaggaggggcggtcgctcgcgcgagctagaccagacggcggcggcggcggcggcggcgatgcgagaggcgggcgggtgggtgaacggcgaccgatgagagggcggcggcagagggatctgctgctgaaaggcaggtttgtcgcaaaggtcgtctttcttctttagccttgctgctggtcgtggtcgttatgaaaggccttgctgccgctgagtcgtctgccgaggcgcacgaagcccgccggtctcgatcgcccgcagcccgccgagcgtagtcatcattcgcttgagcagacaagatgacggccgtgccggcccgaccttcagatcctcgccgacagcagccaccgtaggagaggtcgggcagtaacggccgcagcataaacgctggttgggcagaaaagcgggctcgaagccggctgatttgcggcagcccgtcgggcggcgttgacagtgccggaggcatcctccccgtcggccgttacgctgactcggcttttccagagcaacatgcaaagtagagcgaggcaaggcagagggtataacacggcgtttgcaggagtagagcgagagataagtagggagcgttcgatggtggaggcccggtagagtatgcgagagtcgcgcgttgggcgaccgcaggaggagggtccaaaagggctcgggtgggcgctgagggcggtccaatctggccgattttagagtgagagaagacaacccgcgaagctgaggggggtggggaggggccggtcgtccaccattgcggagagaaatcagaagcggcccctcgaggtcgacggcggtggctgctgctgctggtgagggtgaggcggcgcctgacccggccgaccttgctgctgctgctgctggtagcgcgggtcctgcctcgggtcgggccgcccctgctgctgctgctgctgctgctgctgagggtagccggttggcggcggcccttggcgcgggtagccctgcggaggcggcccctgctgctgctgagggggcagtcgagggtcgtacgacccgcttcttcccggcggacccggccggcccatcgccggggccgacgacgacaccgatgcggacgagtgggtctgacctggcccgggcggcctctgctgctgctgctgctgctgctgctgctgaccggcgccctgcgggcgcgcactggcaagtctcggcgacggcgccggggcgttctgtcccggtcggctcgggggctggtaaatggccgaggacgggcctgcagaggcgggccctccagcgggccgatggccggcgtcggacgagcggggcgagatggcgggcgtgccagcgttggagggcgggccgagccggtttgggtttgagagctcggccgctttgaggatctcgtcgctgcagggtaagggcgggagagggcgagtcagggtcgagcacctggtgagcggccgaggagacagcgggcgggcacgcactcgagcaggttgaggacggcgcagcaaatgacccactcgacgcagtcctcgttgccctcgccgagcgtctgccagacgcgcttctcctcctcggtcttgccggtaatggtgatgcgcgtgccgccgcccttctctggcgggttcttctggatcttgccgaactacagagggaagagcgaagccaaggtgtcagccgagtcgccgggggcggaagcagaaccggcagcaggcagaccgacctctgcccgctttggcggaatctggtggccggcataggcgaaatagaacatggtccagaagtcggcattcgggttcggttttgagatctggtagagcggcgtctcgtccgagttgacaatcttgtagatcggcgagcggacgcctgtgttctcgatcgaccatcggagctcgcgcgaggcctcgcatcggaccgccttggactcgcgcgagtgaccgccgtccgagctggcaggtccgcctcggttgggcgggaagagcttggcgacgcagaggtcgccctggggcgacggcgtcaggaggtagttggtcttgttctgcagggagggcaggccgacgggttcagcgagcggccgcgacacggtagccgagacgcgatcgtgcggcgtcatggcatgccccaggcctactcgtaaagcgagagtctatagtcgggctggatggcttcgaccgaagacaggcagaggagaggagctcgcgtccctcgcaagcgggacgacctgttccgcctgatcacgcgcaccgcgagaaacggctgtcactcacgtagtcggtatgcaggtacgagtagaggacgtggctcggctggcctattaatcgtccgcggaaggcgagttgatcagctctcgaaggaaggcagacggagggaagggcgggacggcaaggccagctcggctggtgacgcaccatggggcgtgacgacgagcgtcggcaggtggtccgggatgggcgcgtggaagggcgaggtatagatggcgtagatggctgacagggatagcagtacacgaggtcagtccgtggtccctcagagagtcgagcgaaagggtgaggaggaggaaggaaaggggaagccggcgggagaagggcgagacaacgtcgacgggccgacctcctcgcgagggcagcgatgagggagagggttcgcaccagacatggctgcttcgcgccgagcgttcgaaagagaggtcgtaggcgggtctagcagcggacgagaaggcaaggaaaacgaagggagcgtgctgggtgacaggagggggcgagacggagggaagggaatcgtcgttggctgacccccttgggccgcagcacaagccgccaaataacgccgacccgaccgtgtggctccggtcttctttcggccaacggcgcacacgaccagcagctgacgacggccagcctacaggagcagacgaggcgcgaagacatctgcatcgtccgcctctggcaccgctcccgctcgcccctgctgcggccgcaccccgtctgaccctctcccctcctggctaactgctcggatccgtcgatcgcgaccccaagtcggccgccgtcggtcgaagtccaacattgatcagcgtctgggcagctacacgaccattgcctcctgctgctgctgttgccgctgctgatcgccctcgggcgcgaagtcgaccgagggtttgcgcgggagcgggtgagggccggctgcccgggcatggtggtggccgacgaacggcgggcctccgccgacgagatgagcggtcggggcggacgaggccgtcgtcgggccgccctcgggagtcggctgctgttgctgctgctgtgggagtgcgtctggctgagggctcggccaaggggcgggcatgctgctgctcgctgctgctgctgcagaggccgccgaggtcgtcgacccgccgctgacgttccgcggcgcgcggggaggaccgtacgatccgcggcgcttgctgtgccggttgctgtcgttccaacctggcggggccgggctcgggacatagaggctgggcggcgtgtacgtctggtggccagcgggcgtgaagccgaggccgtagacgggcggaccgggcggtgacatcgaccagagcgtcgtctggttaactcgaggcccaccgtcgatctctgaccgggcgtgacggttgctgaggttggtgtcgccgctgccgctaccgggaggagcgacgctcactctccctccggccgggccacgacccctccctcggccgcgagcttgcgaccctcggttgccaccgccgccgccacggctgtttgacggccctgttgggaccgagagcgacagctggccgcctccggtgacgcggcgcatgtactcgaccggcggcggaggagggtacgctagccagccgattggttcctggctggggacgaacggaggcggtccaggaccagaggccaccttggaagggtaaaagggcgctgtcggcgagcttggagcggtgtgtggcgaagcgtgcggtgcccaaggcgggcttagcatcggctcgaacggcgtcggcagacttaggtgcgagccggcaggcggtgaagggccgaacggaatcggcgtgcctgggaatgagtgcggtgggccagagtagggcgagccggtcgggagcgacaccggtggtccgagcgcaggcaatggaggcgcgtacgggtcgtgcaccggcgtcgatgctgacgagggtgggtgagtgatccaaggcgcgtcgggagcgaagggctgagccgggtatgaccagacaaagtactggagcgagccgtctggagcggtcgagaggaagacgggtggctgcgaagggaagtggccgtcatctgtcgggctcgggaaggaaaaagggtacatcgagccgggcgcgccaaggccgctttgctttgggtagtcgaccgaggctgcaagatagcgcgagaaacgtcagggccaggtgcagtgcactcgacaaggagaggtcggacgcacaaatgccttgctggccttcttgtgagtaagagccaaaggcaccgccgctataatgcgtcgtgcctgagagtgccggcgacggcaagcctggcgaccaagccccaacgtcctgcggcggctgcacgtagccctcgctcagctcgaacgacgtccctgggctgctggacgagagcgaggtcggaggcgacagctgcggcgtcgggccaaccgccgcggcagaggttgccggcagcgccgtcgacagcgaaggcgccagaatcgatgcaaaggtcagcgaggcgtagcctcccgggtcgtccttgtcgtcgataggcgccgccgagctcctcgccgctgctgagcttgcgtcgaggtaacggccttgcgggtcgggcttgaagggcgtgggcgacatctgctgggagggaaaggggcgcgcagcaaggaggaggcgagtcgaaggtcagccatcgtcgggtcagacttgctcttggggcctgccgtccgacaaacctctgatacggagggagaaacgaggggtcgaggactggatgataggctcttctagcgcaaggagaggtcgaaggacgcgcagacggacgagctgtcggctgtcgctcgtcaaaggtgaaggatgaaagggaaggtctgtcagcgtgcactaagtcagccgtcgcagacaacaggagagctgagcaaggcacagcaagaccggccgctgcctgcctggcaggaggtagctgagctgagctgccgagaggctggcgtcgggtgagcggacggaccttcgtgggcaagaaaaacggagtatgcgatgaaggcgagcgaggtctgtgcggttggtctacgacctgctcgagcgaaggacgaagagagagaataaagacgaaggtgaaggtgaaaggacagttagggtgcgagagggcgaaggtgatgacaggaggcgaaaggaggtcgggtcggcctcggattttgggcaggccgacaggaggctcgagcgtcacacggcactcctgtcgagctggcgggtgaactacctgtcactttatcgctcgcaatttgataggaggcgacggacaagtagtggcccatgccgacttcccatcgccacttccgaggcgaagtagacgcttctcagcacgtcgctcggttggcagggcgtcgtctgctgcgcgtgcctctctgcttcgacgcgtgttgtcgagacgtcccctgtcgattgctacggcctgcggtcgacgatcactgcctttgatcatcgcaaagccctctcgcgaatctgggctgccctcagcttgccgcggaggaactctagccggcgctcgtaccggtcctggacgtcgtgtcgccggcgctcgacgtcggcgagccgtgcctgcagggcagcctgctccgggttggccgacgtgccgcggaaagagggctgcggccggagaagtagaggagtgtaagcgctgacgagtgatcatcaaggggctcggctgggacgcacgggcagcattggccgctcagacagggccgttcgaccgtctgagggcctgcgctgaagcgaagccgggagactcgagagggatgagagcgagtctctgccgcggaggtattgctgctgctggccgttggcgatggcggagagaggcgtcgagtagctcgtcttcttgagcgccggcttcaaaccgccgtttggcccggcgaatttcccgacgctgccgagactcggcgagtgctggataatctcccactcgccagcgacgtcgccgagcgggctttctagaatcagactcgtcggcgtcggcgtgacttgatgatcgccacagtctgcacgcgcctttgcccggagttcgtcgaagacagctagaagccgctggccctcggcctcgacgtcggccagctcggctcgaagttgagcgggtgtcgagtcggcgcctggcaaagagtccgcgccgcctgcgtgaagcgcgcggagagcgtaggccgagggcgggggagtcgtgcctgacagactaccgttccgggttgcggttgaaaagatggagccggtccgcgagccttcggcagtcgtcgagtggatcgacgagttgtagcttgtcctgccagagcggacggacatgccgccgctctcggccatcgagttctggcgcgcgcgattagacgccccgccgctgccgtggtcctgcgacgttctttgcgagcggccgttcgaaaagagcgagctcgagtcgccgacactgccaccgttgctacgcagtcgcgaggcccgcagagacgaaccgcctccgccgcctgagacgttcgaatcgcgattcgagcgcaggtcgtagcctgactgcttttgcgagaagagcgagccgaggttcgaaagacgtgaccggcccgactgcgaagaatgtgctgaaggcggccgatccggatgccgaccgggtgtcggtgtccgcaggtcttctgcgagattccaacgagtcagcatcacgggcagagtaggcgcttgacgaagtaccgacgtacctcgattgaccatctcgctgccaccgctgacggccgcgttccgcgcctcgacccgagcctgctcccgagcggcgctcatctgctcaaagatctcctgacgtaggattcgatagtcttcgtccctgggggcagagcgcgagccgagaggtcagcgagaggcgagtgtcgctgttgaccgacagacatgcacgtgagctcacccgaggaggccgtccgcattcgacacggcgagctcattgagccggttcgccaggagcaccctgacagagagagacacgcagcgaggtcagcaacgtcgtccgccagccacacgtccagtttgttggacgcacgtcgcgtcgtcctctcgacccttgcccttgcggctcggcggcgcggccgactgatctgctgcccgacgtgttgcgtaaaccgaaccgctcccagaagcctcgcctacgcgcgagcgatcgccagcgccgcgcccactgccatcactgctttttggcgggaggagcgtcggtaggagccgtagcggctgctgatggctcggaggcgtcgggaagcgggctgagggagctgccggcgacgggagctgggcctgagccgcagaccgagcttgtgtcggtgcggtcttagaggttgacgatctgctcgacgacttggacgagaactggagaggcgccaaaaaatcacatcaggtcgggttgtccctcatctccgtcagtagaggacgctagggaaggcgcgcgcgcaggcgaagacgggccgccggacagagccgaacacgcacccagcgcgactttgttggctcctgatggtcggacgacgagggcttagagctcgagaagaagcccatccgctgaccggtccgacggcgacagtcgaagagggtcgacgagaggcaaggatcgcaagggtcgttgttcgcaggcaaggcaaggttcagccaagcaggcgctcagtcgatcgcagccggcacatgcatgcgcgggcttcttgcgcgggtggtgcttgaactcgtcaagatgctctcgctctttctccacgagggcaacaacggggccactgatcgtctcgcaagggggcacatgcattaaaacaccccgagccggacgctgctcccgtcgtcggcagccttcgtgaggccctcccagacggccggctgggccggcgcgacgatgctgctccatatcgagtcgcagcactcggcattgtcaaagagcccgcgctgcttggcgtcgcggaacgtgtaatcgaacaggatgtatgggggcactttgagagcgcctgtggcaggtcgaaaggggagcgcgtggtcaggatgggggaggtcgcgccccgagtgtctgagtaggactgaccggcagagagcagctcggccacgcgatgcggcgtgccgacagccatcgagagtggcgtggcctgaaggtaggtaatctgtgcgcggcgggaagaagcaaaggattgtcaggaagtgcgctgtgcgcggcggaagatgaagggggttgacgtacgtgctccgagagcttgaagtgcttcgcaaacagctgatggtgagcgaagagaagagaggcaacgggtcagccgggattgacgttgccggtggaacggcccgagcggccgtcgagtcgacggaccttggcaacctcgccattcttcggcttgagcggcgcctcgacctttgctttcttggccggcttgccacccttcttctcgccctgctttcctgaagcgccgaccttgtcctccgctgccggcttctcgagcggcccgagcagcggacggagctcgcgcacgaggtcggcgcagcgctggcccgacgctgcaagaatgaggacgtgcggcgcgccgttctcggtcggcgcactctcgggtagtggccgggagagcgagcgaatgagcgagacgagaaggtcgctgctgccggttgcggccggcggcgtgtcgaaaacggccgagtctgcaagcgtaggcgagaacgcaggcagcgtcagccggttgcacgagagagcttgagctccgctcggctcgggcctcaccaggcagggagcggtcctcccactcgaggtccgacagctttgacagggccttgcgctgacttgtcctgagcgacgtgaggacggcggcggtcgacgtgctcgcaccgccggtgcccgaggccgagagagccgagctcgtcaggcgctgcttctgcaggtcaaggcgccgtctaggccaaaggtcagccttatgtcctgcagctgcccccttagcctagagaacctcctaccgagaggaggctcgctttgagctcgtccgactgggcgaggatcgggcgaggactcgggctacgcgacgcaccttcttctccttgagcttctccttgttgcgccgcttcttctccttcttgcgctcggcctcggtcagctcgcgcccggcccccgtcggcttggcctcgccgtcgctgtcgctgtcggacgcgacgtcctcctcgccggccttgcgcttgccgccagcgacgggcgcgggcgagccgccctcggcgtccgggacgatgccctcgccctcgacgtcggcgtcgccgtgggccgcgtggctgaacgagaggtcgtcctcgccctcggagaggtactcgtcaccgccctgaacgtagtcgtcttcgagatcgtcgcccatcgtcgttactgagaaggtgaaaggggctggagggagagttgagagagggtgaagggacgctacggtcgctgcgggaaatccttgccccggccgcgcttccggccaacacgcgggcgagattcgccccgacgcgccggacgagtatgctcgagcgccacttgcaagggagtgcagggccagtgccaagagagcagaggccaagaggggacgacagaacttgagaagaaaaagtggcatatcggtaggtcgagtcgcatctcgtcctcgccgcccatgcagcgaccgccccttcctcagaggagcgagaacgtgccgttcttgagcgcctgcgcccggaggtcggtcttggtccatctggaagaatagggtagggagcgcaggagtgtcagtcgacaaggccagtctttgcccgttcgccccagaaacaggagaaacgcacccctcgccgaggacgcccggcccgcggacccaaacctcgccccgcgggtcttcctcgccctcctcaatctgctcgtcatcgacgccctcgagccgaacctcgatattgaccgccggaggacccgtgtgcgcgacgccctccgtcgggagcactaactcacccggaacgaccgactgcttgctcttgtcgtatgtggctgacgaggtcggcgtgaattgcaactcgcgcaggccggccgagacgggcgggacggacgagggcatcgtctggaggtcgtggaagtgggtgacaaagacgggcgtcgtactctgggtcgaggtcgtcaggttggtaacgggcgtcgcgaggtggacgcgcgcggcttggaggagcgtcgggttgaggccgcctgcgacgatggggtcgcattgaggtcagtacagaactttatatgcccctgaacacggggctcaccacccaaggtcgcactgtcgacgacgatcactgcccgaagcaagcttgccagtccgcccatgacccccttccggacgcctgaccaaaagtacttttcgagtctgccctcgcgcgcgaggaagccctcgctcaggtcggccaggatctggcgccgagcgatcgagtagagcggcgagcgtttagcgacttcttggatggcatgggtgagggcggcgagttgcgacgcagtgctgaagtcgggaggtcgacgtcagcccgaggcaagcgaggtccaagtgcaaagccgggctcacagaaagaggatggtcggtttggccgcctccaggaggagagctgacgctagctctgccgccggcgaagactctgggacgacgtctgagaaagtagcccgacagtcaaaagcagccattgacggcgacaaggcattggaagacgtaccaggctcgtcgtcgtcgtcgtcggaaggctgctcccagccgctgccagagccaaaggtccggaagccagctcctggtgacgcagcgcgagaagtaaagtcagcagtatgcgctgcaccgcacactacgcaagatcgccgacgcaccgctccaaaggctggcaaagaggagagcgagaccggccggcgtgttgaggctgagcacgctggcgatcgtgtcattactggtggaagacggccgcttgtgggctgggaagagggcgaggaggccggcgatgccagcagtcaggttgacgtgagtgagccggctctccaagaccttctggtggacgagcacgaaggaggcgtcagcgtcagtgaggacacaaagcgacgtctgatgccaccgaggaagggcagacgtacccctcccggagcttcccagatgcgaaggccaaagacgtcctgctcgccgacgacctgccgctcagccttgtcctcgacgccgttgccggccacctcaacgtcccgccaagcgaccgcgacaagtccgtgcttctctgcgagccgaatgatgccgccggcctcttcctcagcgccgacaatgatgagcgccggcttgactcccatcgacgttgcgccctcgtcgatcagctgctcgaggaccgactgggccagccgcgcaggaaggacgagcgcgagcggtggggtggggcgctcgagggtgtgtgcgagcaggtgcggtgtggagagagtcacgagtgcgtgggtcgggctcggctcgagggcaagggcgagcgtcagaaggacagagtctgagtgagaagaggccgggcgggcgcagagtcagcggccgggccggtgcgcgcgcattgaaagcctcagctcaaggtcgcaccaaacccatccggaaggaggttgacgatcccgcccgttccgctcgcgactgactcgagccggaagagggcgtgcaggcccttgccgacgttgtgcgcgcgcagccggaggaggtcgttcgagatctgggtcgaccggcacgcggccgtgaggacaaccggcgtcagtctggttctcgagctgataagagcctcggcggtggcacaccttctcgccgtagacgaaacgagccgtgcaggacgggtcgaggacgttgacgagcgtcttgagcgcacccgccggccggaccgtcagctgcagacgaggaagggcgaaggcggtcagtgcgctatttcctcctctcccgcttgtgcacaccagtcggtcgaacgcaccggcggtccgtggcccgctgcgaagctcctgtacacgccactctggcccttctcgcgcgtctgcgagacctcgctctgccgtccgaggaggagcgggtggacgagcggccgtggccggacgaggtacgtcgcgtagacgccgaggacaaccgtcagaagcaggaggccaagcgacgtgtcgttcaggagcggccaggcgacgggaagcggacgggagtcggcgtcggccatcttgacaagtccctgcgagtgggtgcgaaggaagaagaactggtgatggcagcttgcgagattggaaagtcgaggcgaaggtacgtgctggcgcgtgagccgacctgcagcttgctctccctctcgacatcgaccttccatctgtacctcgcgacgctgctagctgaccctctcttaggtccgacacctccttgccttatcgcgctatctcctggctcagtacagcatcgcgcaccggtgcgtcgtccgagagggcaaagacggagggcgaggcgatcgaacccttgctgcacctggcgcctcttgccttgcctcggacgaccctggcgccaccactggtgccgaccgcccgagcaggccgcacccgggcccgaccgaagtcttggctgggcgtcgagggcgggtggcacctgatcatcgagcgagcctgggcgaacaggcccatgagcggcagcgcatgagagaagccgggcccagggaagagggcgagcagcctcacccaccctgccgcccaacctgctccccgccatctcacctaacagccgaccaagggggctacgcaactacctgccatggcacttgccacaacgacctatctcgtccgtacccggccttcgacccgcctcagtgccaaatccactcagcgctgacccctgttcgcctgctcgcctcctgccgttccaggtcctaatcctcgccgccgtcctcctttcggtctgtctcctctcttcgtccttcgactccctcgaggtcttgtggctgacgctccgccccgcccgcggcccccgccgcacgacagtatggcctcgggacggccttctacctctaccgcaagcggcacgagcagctctatgtccccgacgtgccgatcatgacgggcgtcgtcctcctcctcccaaacggcgtcgagggccgcatcattggccagctcgacggcccgctccgattcgacttctggggctacgagatgcggcaagcggtctttgagacggtcagggacgacatcccgccgctttacgaggtcgagcttgaggactgggaggacgagatcgacaaggcgaacggccgacggaaggacgaccactcggccggctggtttgactaccaggtgtgtctggagcctggtctgcccatctttcgcaacagccgctgacctacccgtccgaccgccagccgacctcgagcttgcttatcccagaccagccgcaccctcgtatccaagcgacctaccttgtcgcgatgccttgccctcctccggcacccttccccgaaccctcgttcaacaaggagaccttcaacccggagcccgacctggtccaggccgagccgcacgacctcgagcttgcgacgctcacatacgagattgacgtgccgacgtgtgcgagcctcgtcccgatcggcacgcccctcttccgaccgacgacgcggacgcactgggtccgaactggcaggcgacgcgaccagggcccctggatgttctgagcctccctaagctttgctcttctacctcgccgtcctttatgctcgatctttgccgctcccctgtagctctactccctccgtcttccatctcgcctgcttgttgccatcctcgaaacgtccttgttctcctcttcctgacgctagcatgacctcttacgaccgagaggctgtccgggcgagtgcactcgagaagcagagcgacatgcgtactcgccaacgacgaatggggtccccgtctgcccgtcttccgcgcccgctctgacccgagcgaccaacgacggctctcgttttccgccctcgacgaccaactttgacctctcgccctcctatcgactctagtcttcgtcgcaatggctttactcttccggtcatcgaccgctctctttcgacaggctcctcgttctgcagccggcctccgggcctacgccaccccgccgcctatcaaggtgccggtcgccctcatctcgcagttgcggtcagtctcggcctattctcctcgtccgctgtccttgggtcctaggagctgatgccggaccctctggaccactctgcaggcagaagacgcaggtgacgatgggcaaggccaaggaggctctcgccgccgccaacctcgacgtcgacggcgcgctcgagtggctccggaaggacctcgctgctggcggcgcggccaagcaggccaagctcgcgggccggacgaccaaggagggtctgatcgctgtcggcgtcattggcgagggctggggacggcgaggtggcatccttgaggtccgtctgggcagctgcagcgtgttgggccgccggctctcaagagctgacctgaagacccgactctgactgggcctagctcaactgcgagacgtcgttcgtctgccgaacgccgggcttcatcgacctgatccagtcggcgctccacacctccatcttcttccacaacccgccgacgctcacgtccgagcagacgccgtcgtcgcacctgctcgtcctcccgcccgataacgtcctctctgcgccgctcatgcacccgaacccggacccggcgacgccgccgatcgcgacaacggccgcccagcagatcacttcgctcgtgacgacgacgggcgagaagattgccgtcacccgggccgccgtctttgcgccgccgacgtccgagacgcacgatggcctcttctacccagccttctttgcccacacgccgacgggcgtcccgagcgggcttggctcgccggcggccttcctcatcctccacctgacgggcgagggcaccaagaagccctcgatccgactcctccgcgagaccgaggtcctcagccgggcgctcgcccggcagatggtcggcgtcccctgcacccaaatctacccgttcaagggcggcctcggccacggccccgtcgtcgagggctcagagacgtttgtcgagcagcactttatgttctattcgggccctgaggccgaggggggcaagtcggtcggcgaggtcctttacaagtggggggagacgcacggcgtccaggtccgaatcgacggcgccgagcgttgggtcgtcggcgagggttccgagctccaggagcaggagtcatgagatgcgatgcgcccacagtccagaggtcctgctcgggcgagcggcggctggcacgcgtccaaggcggcacgagacggacctgagagcgcatatctatcgacacagctgaacagccagccgccgggtcggcacgactcgagatcagtcccggctttagcgccctttgtcggccgggtccatgtacggcttcgccgggccgctctcaacctcccctgaggggcggccggtttcaggcgcgctcgccggcgccgacgcctcgtcgcgccctgagggcgctggcacgggcgcataggcattctcgaccgactcgctccgggcagactgccaaaggtacttctcagtcagccgactgttcgtccgcccacagcagatgtgacggacgacgtaccttgaacaggccgcccaggaagccgcccgaggacgccggcccagactcttcgtcccgctgcgggctccgcccttcgagtgccgtcagaggaacgctctcctcgccgccaccgtcgaggccgtcggcatccgacgggaggcggatcgaccggccatgggcatcgagatgttgctcgcccgtggccgagatcgccttctgatacttgtggtgggtaaagaggacgatgcctgcgagcggggaggcaagttcgtgtgagcagcgtcgcagtcggccgagcttgagtcgcgcgcgacgcaccgatcatcgtcacgaacagaccggcgagattgactgtcgtgagctggtcgccgaatgcccacgaggcaatcgagatggtcgtgacttccttgaagacgccagcgacgctgagcgggacgacaccggctcgctggatgatgctgagaggggcggccgacaggtcagcgacagcgggccgagagcaagtcggggccgcacgcactagtattcgctcgcgaccatcgaaaaggcaagaaggcccgggatgacgatgatgacgcaggtgacgagcaaccggtccggcgcaaagaagtcgctggcaaagacgttgccccagccgtcctcgtacatgctgacggcggcgagcgtcgccgccatgacgggcgtgatccagaagatggtcgcgaacgggttggtgaggccgagctcctccttgatcatgagggagtgcgtgagcgcccagcggaggccgccgagggccgaggcgatgaagacgagcatcgctcccggcaggtcgaccgccgtcgtgttgaacgccattaggacgacgcccgcggtgatgaggccgatgaccgagacgagtttccacgaaaaggcctcgagccggaagaggaaggcaaagaagaggacaaagatgaggctctgcgagaaggggcagggtcgtcagcttgggcggggtctggtccggatgctctaagggacgggacgcaccgacgacttgcacatggctgcaaggaacgagcacatgtcagcacggccaatcttcaatacagtcgtcggcctcaggcgagactcactgtagagcgacagggtgattgtctttaggctcaggttcgagaggccgatgtcgagcgcggtgctgacgccggtcggcgtgactcgcgtcctgaagggggagtaaagcgggcccaataagtcaccgggcagccgtgtctatgcatgaagctgctcgggacgcacccgtagtccttgagggtcgggttgtgaggcggcttgaagcggtcgggcatggtgaatcggacgatgctcgccaagccgaactggatgagcctgaggcgcagacagtgtcagctggtgttgccgcaaggcgatcgcgtcgcaggacctacatctggcagaaggtcatgaacatggggaagggaaagccaaagtaacttggcccgaacacccatttgttgtacagctgagagcagaaagggggtagagcaggttgaacccgaggtgtcagcccgcgctgcttgttgaacgacaggcaatagtcgaggaccgaccgagatgagcgtcgagaacatgtacctgatgcaccgccaagccaggtcaagtaggaaagggtcagcgctctgccttgcatgcgcgcttccgacccagggacgcaccagaggaggacaaagatgccagtgaccatcgcgtcgcgccagtagagcttcttccggagctccttctcgctcgcgacgtgcccatcgcactctgtgagcgcgagcgttttcatctcgtgctgcatcgcgcgctcgtcgtcatcgtcgtcgctgctcctgctgctgcggccgccgccgccgacacctgggcgctcgtccgtcgatcggcgagagggaccggtcgctgctccgtcatcccaagcgtcccactcgtcctcgtccgactcccagtcggcagccttgcgttgcacattgtgtggcttgcttccctcgtcgtccgaggtcgaaagcgaggcccgacccttgccagagcgcgacgccgcggtcggagccgagctagcctcaccgccgtccgaggcgagcgttatcgggtcgtagctcgtcaggctccggacaggaccgatgtggcctgagggcatcgcgctgctgctgctgctgctcgcagcgtgcccgtttgggatcgccatcgtgagcggccgaagggacgtgcgactcaggctgaaagggcggcgcgcgcgggcgcgtcttgggctagagggcgagtcttccgcaagggcagtcctccgccggacgcttgacgagagtctggtcaatcggaaccgtaggtcgttctcttgcgtgcaacgagcgtggtaaaggtgtcgaaagaggtggaagggaggcgaggcagagaggtcgatatggccgtcggaaggcagcgtgatagagcagcgccatctcgctcgtcgctctctcccaccctccaacagtcactgtcattcatggcaaaactccctgacacagcagacccagcgacaccgacgccggctaaggctaaagctccggctcagccgctagccgccggtggaggagcttcaaagcgaggtaagcgggctcccaaggcccagcagcagcagcaacaggcgacctctgcacctgtcgagcgtgagagaacgaccacggccggcagcgctggaggagcagcacctcccaagctcaagattgtcgtccggcgcctgccggccaacatccccgaggaggtcttctggtccagcacggcccagtgggtcaatgacgagacggccggctggaaggtcttccgcaagggcaaggtcgccaagtcgttcgtcccctctcctcttgcgccctggtcctgccatctgacgtaccgtatgacacacctcgcttgcagggacaaggagccgacgcaatcgcgggcctatatcctgttcaagagccaggcggctctgctcgactttcaccgcagctacgacggccacctcttccgcgacaaggccggtgcgccctggcgctcgcacattgatctcgggcgagcctcatgggcgctgaccaggcctttgctgttgctcacaggcatcgaaagcgtcgccgtcgtggagtacgccgtctaccagaaggtccctatcgcccggccaaagccagacctaaaggcgggctcgatcgacaccggttcgtccttccctgtcacctgctttgcgcactctttctctctctaagttcatctcctaccgccggccagaccccgactatctgtctttcctcgagtcgctcaagccgcagcccaagatcgccgtcgaagaccacgtcccgcttccggtcaatccgaccgaggcgcagaagcagaagatcacgcctctgctcgagcacctcagggcgcggaaggcggcacagattgcctcgaagggcggtcaggcggcgatcaacgctgctaatgcggcggctacggcggctgcatcggctgcggctgctgctaccgctgctacgcccggagcgggaaagaagggcaaagggaaggataagaagggtgccgctgcgccggcggctggccaggcggagactgcgaccggggccgccaagggcaagaagaaggggccgaaggctgccgggagtgctgtggcagcaggagcgtcgaccccgaccgcgtctgggacgacgaccccagcgctagcgaacggcgctggcggcaaggctgccgccggcaagaaaaaagcggccgccaccccgggagaaggaccagcgctgaagccgagcaagaaggcgggcaagactggcggaccgatccctggtccgacaggcccggtcgacgtcggcgttccaggtgctgcctcgtcagtcccgactggcgcccctgctcccgcgaatgcccgctcgaagcgccgcgagacgcgaaagggtgcagcggcggcggccaacggcgacggctcggtcgcaccaccgcaaaacgttccgggaggcaacgtcgtcccgcccactttgaagcctaagattacgctcctccagcgcgacgccggcagcgcggcgccgtcaagctcgactcagccgccgccaccgacgatcatcggcggaggtcaggcggggaaccggccgacggcaccggctttcgtcccagggcggactgttgctcttccgtcctcgtcgacggcggcgacgctcgctgcgcagccggcggcgcaggagggagcgccgtcgaccggaggcactcgcggcggacgttctggcgccggtcgggggcggagcaatcgtggcaagccgaaggcaggctgaagggcaacctttactgttccggtcgccctttccctcggctcgctcgagacgggcggcccggtcgactctgacagtggggcattgcccggacgacaggaactcagtcggccaagttcatccgtcattcgacgccgcgcgtgacgccttggcagcctcctcagccgctggtaggccgcctatggtcaccgactcggcgtcctcccggactcgctcctcgtcccgtcgccttcttgcgcttgacttgatgcgctcgaagcggtccttgaagcgcgcaatcgtctccttctactcgagggaagggagcgagttcgccgtcgagcgtcaggattggatctcatgccgcctgactttagacgaacctgcgaagcgttctcgtcccgcaactcggctagttgtcgctcgagctcgtcaatgcgcttctctgcgggcgctctcgagaggacgtcagcgtcgattcgtgccattgtcgcccgaagcaattgggctgacctgggtcggacgtcgatgagctcctcttacccggctcgttgttcgtgaccgcttgctgagccgcctggacggcccggctcatctcgagcaccctgctctcctcgccccgccagaccttctcaacctcctgccgcaggcgcgagaggtcgacgacgctcgctgctgcggccgagaccgtcaccaacttgtcggtccgcgggcggcctggtgttaacgataacgtccgccgctctgacggcaccgacgtcgggccctccctcgccggcggtagagatcggacagcaggagcaggtgacgaccgagccgttgtcgaggaggagctggctgcgtctactagccgtcgctcaagcgcatgcgcgtgcgacgccagcgtgtcgagcgagagcctaagtgaaaggttctcgagctgaagctcctccaacgtcttggtcctactcggaggccgcgaaggggcagtgcttagcattcgaccgctgggatacacagcacggcggcagactggcctagggacgtacgaggccggaaagtcgtcgagcgaaccgaaggacgacgccgccgagctcgcttgaggagagaccaggaggaacgagtcgtgcgggtcggcgcggcggtcacctcctgcgtggagggaattgctctgatttcagctcagtcaagattcgacgagaagggagatcggaggctgcgcacgctgctctaagttggccggggtcgtcactgaccgccggagagcgctcgccaccgtcggccctggtgctgcagcagcaccgcgaccggtacggccgtcaagtacggatccaatcggagcagaggcgaaggcgaccgggcttgagtagtcgccgagcatgcctgttcgtgcagcatatcgaggagggtgttgagtcaggaaggcggttccgcgattgaggcacgacgataggcaggtaggcaccactgaccctcgacgacggcccagaagcggctgaaggggtcagcctgcgtcgtccaccggtcaataattatggtcagtcctggcatgtccgccctgagcaccgacgcaagagcacgcgcacccggtctctggtggaaaggtagctgctactctctccaggcccgcctccggtccacgagcccgagccggcccacccactgccactgtccctcacatgagaaggcccctcgtccagtcgtgaacggtcaaggtgtcgctggttgcgagcccgctcagccgcttgacgaacgagcgacgtgctggcccgcatcgtcgcgtgagtactcggcgatggtggaggcgagctgagccccaccgttgctgaagagccggccgctgcagacgaagggacgagcgcgaacggcggcgcaggctcgttgccaagctgctcacgccggcgctctggccgtcctggccgtgagcgatggcgatgtgccgaggatgaaagcggcggcggcgatgagattggagttgggccggatccggctgaggagctgctggcggcgtgaggggccgaaggcggggcttgctggcgctgccgggcgcggtcaaggtcgagcgctttccgctcgagcgccttgcatgtcttcttggcctgattgaggtagcaaggagggtcgttagccaggcggatgcgatgctcgcaagcggaaggcaagggacgaacgccgacgtcgtctgtctcgtccgcggcgagcttgaactgagcggcggattcgacaaagcgcccctcggctgaaaggcggtggccgagcgagagcggcgagaagcgttcgctcatgtgcgaagtttcggtgatggtggatgggtgacaagggacgacgtcggtggggcagcggctgggtcgttgggtctgctgcgcggtcttcgtttggctggagggacggttcgacgacctcgcatgaatgagtctgcctctcgacggccatgtcgcactgccttctcctgctggtgctcatgctgacccttctcattggtcttgctctgaggtcgacggtgtcggtcagatacgagccggcacccaatgctccgttgacggcggaccgaccggcaggtgagctcacgggccggctgcggtcattctcgccatcggcgtcccagcagaccaggaaggcggacacagctgggcttatccgccagagagatggtgttcataggcgaccgcccgcagcgcaaggcgaggcaatgcgctctgtcgataggctgacggatgcacctcagcggtctctaacgccagcatcatcaccgcgaccagcgagggttttactcacctctctcctgccttcggattctaacagtcgcccaaccctctctaagcccacaactgacacagggtagcctacgaggctgtcgatgactctcgaactctttatgagtggagtatcgactcggcggccaccagtcttgcccatccccgaaaccctccccgacaccatcaacgccggcccttccaagacgacgcaggctcaacgtcgatgtctgttcccttatgtgtcgacagcggcgacagaagcgtagccggcagtctctcagctctcggttccatgcgccagcccaccgcttcacgagactcgctgtcccctgcggttaagttcgtcctccagccctaccaagccagccgacacgcctcatgacggtccctgctgtcaactctagcaaggaagagcgctcggcttacggcactctggcttgtcagacgaatgggccacgcgccgcaggacaactcggcccagggccagccctctaagatctaccgaggtcggcctcgatcctgtgcacgctcggacgctgacctctcgcttagcccaatgcgcgcgcaagtgtcaaagacaggcttggattaaacgatcaaaagaagaagagaggcgaatacgaagggggtggaagatggaggaggggattacagcgagacaagggcagagtgaggaggtggaggagaggtcgtcgtcttcaaagacaaggggggcggtcgtaagctgacgggagggggtacgtagcgtggcagtcaagacgggcagaggacacgatttggcatggcgtatggcagaggatggagaaaaccagagcggctcgaggggaagccggccgagccaggaagggtagcgagcaagcgagcgagcgagcgagagggtcgctttacttcttggcggcagccttcttgggtgcagccttcttaggggcagcggctgcaggcagagcgttgaaaagtcagcgcgagtcctctctagcagggatgcggcagagcgggagggacaaacccttagccttgggcttcgcagcagccttggtcgtcgacgacttggtcttggtggcggtcgtctgcgcgcatggatctcgtcagcatcaagaagcgtcaagagacagacagccaaggacgcaccttcttggccggggtcttcttcgcgggagcggccggcgccttcttagcggcggccggggtcttcttcgccggggcaacagccttcttggcaggagcggcggcctgcagaagtaacgacgcgtcagtctcgatcgacgcgtcgcgagggacgaccgggacgcagaagcgagaccgaccttcttggcaggggcaggggcagccttcttggccggcgcggcagcaggcttcttggtcgccgagacgggcttgacgttctaggccgcaagggggcgccgaggtcagcttcagggcctacgttgcgtttgcgagtttggaaggaaagcgagtcacctccttgtcggcagccttgaccttgggggcgagcttgacgcggccggacgggcctttgagatagaggtgtatatgcagcgttatagaacgaagaccttaaaaggggagtcagggagacgcacccttggggagcgcaaagacgcccttgtcggcgccggtcgagatggccttcgacatgttggtcgtgttggacgcggccgacatgtcaagcttgtaggtggcagcgagaaacctgtgcgcgatgagaggaataattggcgagacggagcgaaggacggaaggggggagcgtcagtggtcggagcgccgggtcaagggacggacgcgcgacgcgagaggcacgcgatggtgatagaggggacgaacttcttgatctgaggccgcgaggcaccatgccgggtgtcctccttggggagctgggcgatgcactcctatcaaagttggaagcgagggttgacggaggcggcgggacgggagggggtcagtcggccaggacgcgagagagggcgaaaagctgatacggcccgtcgagacgatgagagctgctgccgaccgttgcaccacctcgacatggcacgagcgcgacatggctggaagcggagatgtcccatccacgccggcgagccagtctcgcgaaaggaggtggtgatggagaggtaagggaggaaaaggagtaggatgggagccgatggctcgacgacccgggtcgtcgagccctcccgctccgcccgatatggccgcctcactcgacgagccgccgcagccgaacgggcacctcgacgcgcagaatttctggacggaggggatggatgggaggtcgaacgagcagatgacgcgctcggtcgcgtcgaaagaagtgaggaaggagggtgatggagggagaggacgctggatgtcggatcccccaacaaggtctcgccgaagaggcgcgagagaccgacaccctctcgcgcccgagctcgccccggccagaggatgacagctagaggcgtcacactcggccagggacgtgtccgaggtgacatcgagggataggcccggccaaagtggccgagcgagagggagattggcgaggaggcgagttgatgggaggacgaccaccgaactcgtgacgagacgggaagggagcaacgacgacggaggacggaccttgatcatgtcgacaaaggtcgggtgggcggccttggccttaggagcagcagcggcagacttggtagcgaccatgttgagagtgtaaaaggatttgggtgagaaggcgagttgcggatgaggtgggcgttgggtgggggcgggcaagaggggtcgacaggcgggcgaagaggtcgcgcccgcgcgcccgctgccgccgccctgcccgcgcgcgcccgttcgctgcgcgcgcgcgcggagggacgaaaggggtcgccgcccgccgccgcgcgcgcgaccgaaacgacacgacgccccgactcgatgttgtcgggcggtcgctcgcctgcccaccgtctattcagacaggaagaatggcacagagtggaggcgatccttctgttcttcctatcgcaccctattttgatgcaggttgaggcgaaggaccgggcaagatcagtgactttctggcccgaggtcggagtcgcaaaaagtcggcgcgacctggccaaaggtgtacgtggcctccttttctccttcagcccttgcacatcagcttcgaaaccagccagctcagcctggaacatttcgctcagagtcgcatgcgtcgtcacacggcctcgtcacatccacagcagccgtcctgcccggccaagaacgagagctactcgaggcatctttcgaaagtcgtcgtgcaaaacttttctcggcagtccacttgcaatcgaagtcgacctaatttttaacaacagcggcgcaccgcgtggcgagctcaccgggtgtatagacggagcgctcttaccatgcgaccggtcacccgccagagtagaccgcccaccttttccctccgttgagcgttcgtgcccgaatgtttacggccagacaatcgacagccgctgtcgtcgaagcgacatgagcatcgaagtgaaggaactttgccgaaggaatcctcggcccgcagtcgcttccagcctctcagcacctcaagccgcaccctcgcgcgcccacagaatatcgcctgacctcctgacggcgcgtaggaagaaccggtggccgattgagccgggcgtgcttggatcgcccggcgagaggaggacgttgttgtctgagaggaagagcgggacgccctctgttcgcccccgacgcgcgacggcaggacggttagtccgcggcgcgagggtgtgactagcgaaataagggacgcacggctgattaggagcgagacgtcgaggtagatgaggaggtcggccgaagggcggatgccagagacaacagccgctggtgtcggttcggcgtcgtcgatcgacgctgtcgtcgacgagggagaggctgaggccggggcaggtggaagggcgagcgcgacgtgaatgtgctgcctcgtcatcttctgaaggcccgtctcgtctgccgaatcaaaggtaaagtctcgtcagcgattggtcctcaaacaacgcggctaggcgaatacggaagaacgcacagatgctcggccagtgccgctcgtacgtcccgtgcacagcgagccctgcctcttcgggcttagtgacgcgccgcatacccgcctctacaccggcgaggtcgagcgaatggccctggttcgcccggatgaacaacgcggaacgccctcctccctcagtcgagttcgagctcgcgctcgcagttgtcgacggcccagcctctcgcgcttcgtcagacgaaggtgctgggagttctgtcagagtgtagcgcgactttgcgtcggcgtcgacgatctggcggagctgggcgaggttgacgttggcgagcttgagcgaagggtgggcgagctgcgcggccggtcggccggtgagtaagggggaggaaggtgagcagtcgggtcagaggtcaaggagggacgggcgagtctgcccctgctgcactcggaggatgccaacacaagcgaggagaggacgcaccagctcatcaacgagcaggtacccatccggcctgattccaagcccctccttctcagccccgtgccggaggaggaacgcaagcgtcttgctcacccgcgtcggcagagggtcggttggccggccgcggagcgccttggactgctgaggagcgcgcttcggcttcggtttggctggcgccgcgtgcttcgagctagaagcgggcgtgctgagctgggggtctgacatgctgaaggaggctgaggaggacggggtgagtgagcgttagcagattggctgcgccttgcaccgacgccctctgacaccgaccctgaccttacccgactcgcaaggacccacagacgaccgacccctgcggccatggcttcgacatcgacagactggctcgagccaatgtacgtccgagcaggcaagcagctgtttcagaaggaggcaggctgacctcgtcgcctcgtcgcctcgtcgcctcgtcgcagacctatcctccagtcggtcctcccgctgatctcgacggcaagcgacctcgagcatgtcagcgacagtcagcggctgatggatgagcgcgaccaggagcggatggccgagcttgacagcgtccattccgagctccgaggtgcgtccctttgtgcccatagaggaaggactcgacgcgtcgctgacgctctcgtttggtcggtcaacacgcgcccgagtcagcgctcggcaagaagctcgcgcacgcctcgtcccagtctgtccgaccgccgcacgtcccatcggccgagtcgcaccggctcaagatggagcaactcgaccggcaaaagtttacgctggcgaagacgatcaacgagcggcaggtcgcgctgacgggcgtcgagggccgggtcgacaagctgcgcgaggagggcaacgagcttgtcaaagaccgcaaggaggcactcgagcggagcgacgacctcgactcggaagcgtgggtcatactccgagccctctgctgtcaaagcagcgtcgagcgacagtcgtccctgacctgccctctcctgccgccctcccttcttcgcgcagcatccggcttaacctcctccagtcgctcggtttcacccttttgcctgcgaccgacggcggcacgggcgcgcgcaacatcctcgtccggaacgaccactcggacgatgtgacggtcgtcgagggcctgcgggccgaggaccgcgccgaccgggcgaagcgggcggcgctcgccgaccgcctctggggcttgacgggcgatggggtcgaaacctgagcggcggcgaggcaggggacgtgtataagaatactggcagctttgacgacctatatgacgacctttctcatttccatggtgacgacgactcgaaggccggcggctcacttcgccagtctcgtcgtcggtcgagagtcgtcgcgaggtcgcgtcaacaccgaccacccagccttgctcctttgcccgcccaagcagatgatcacgccaaccttcgagctcgtgcaaacgccgacccacctgacggccaagatccactgcccagatatctctgtccgtctgcctaccctgacgaccagaagccgaccgagatcgtgtgcctgctcctcggccgacgtgggctaaagcctcgacatcttcctcccccagccggacgaggtcgagctccatacgtccaacaaccacttttcgctctttgtcgagcccttttttctccggctcgagctcccagggagcgtcgtcgagtcggacaacgaggctcaggcgtcctacgacgcctcgtcgggcgagctcgaggtcgtcgtccgcaaggccgttgaggggctctggaagggactcgagaaccttgaggggatgctcggcgtcggtgagaagggcgagatgatcccaggcacggtgccagagggcagcaagggtctcgagaggctgatgaagggcggaggcgatggcgaggcggcccggctgctcgagctcaagaaggagcgcgagatcttcctcgccggtatgtctgctccatttgctgctctcgcagtccggctgctaggactgacgctgtccggcaacttcttcttcttccctcgttacagccgaggccaactcgtggcggctgccccagtcgatgccaggcgcattggcagcagcggaggcaacgaagcccaagggcgacacaccaccctacggcttcctgtcgatccacagcggcctgttcccggccggcatccatggcgacctgaacgacctcggcccggccggcgagtcgctcagcgtcgacgagcggacaaagaagtgtggggagcgcgaggaggcaaagtttgacgctggccagtaccagtcggtcgcacttctgtcctctcgaccttttgctgcgcgcagactaatcctcgactgttcgactgcgtttcgcaggggtgactttgtctacgatgacgagatcaaggagctcatccgctggaaggcgccctgggctgaggcagctggcgccgagcccaagccggacgacgtctttttcactgaagcggagaagacgacgctcgcctcgctcgagacgaccgacgctcgtcagtccctcgtctgaccgatggcgcatgcgagcctcggctgatcgcttgctattcttcttctcagtccccttcctctctggcctgaagccgacgctctggcactcgcttctcgtcatcctctttgcgacggcgtacgacacgcgctcgacgctcgccgacccgacgccagagtcggcctggaccgtcatctcgctcacgccgctcttcaccgcgctcctcccgtccgaggcctaccctaccgtccactcggccctccgcgcgagctatcgccgggcgctagccttcccgctctaccggcactgggctctctgcgatgccgtccgggccgacgtcgtctcgctcctgaaagccggccggcagcaagtcctccgcgtcttgctcagcctccaggcgatcctcggcgagacggccgactatgccattctcaacacgatctgggtcaacgcgctgatcgcgctcctccacaagtcggagccgtcaaacgtcgacatgatcctcggctttgtcgccagccaggtcggcgggaccgcccttgccaagaccgatatcggctggccgctcgaggcgcttgaggcagagacgcgcgagggagaagccgagccaatggattagatgcgaaggcttgcggacgataacctcgcttggagcagaagcggcatggcaaaagcggcgtggcaaaagcggcgtggcaaaagcggcgtggcaaaagcggcgtggcaaaagcgggggcacttgggggcggagggcagggaaagtgggtagggcaacagcggccgagcgatcggcacgggatggtgacgccagagggaagtacgagtaagaggtggaggtcgtcatggagggggggtggtcattcgtcatgaggcgcgggaaaggtcgtgaggcgtgtccatagagggctaagttttgaaggatacataagaaggaggaagaggaaaaagggaaagggtcgtctcaggaagcggtgccgccagacttgcgcttcgaccgccgggtggcgaccggctgtgttgtcgacacggcagcggagggctgcgcgggtcggctgcgggtcttgaccgggctagaccgagcagccgaggttggtgcgggcgaggcgactggcgacaggaacgcgatcgggtcaggcgacagcggcgaacccgggtccgacttggcttcgaccgccgtcacgatcgccttgggcacagcagaaggcgggagcggggtcttgacggcgaccgggcgcggagtcggcttcgccatggccttcttgggcgatgtgacaggtgcgggcttcgtctctttgaccggggccgcaggggtcggtcgagcgacggcaaccggcgtcggcgcaggggcagcttccgacttgaccgtcggccgagctgaaaccgtgacttgagctggcggcgtaggacggggcggagcagcgggggcagtagccgcattgacgcgcggcttcgaaagattgacgggcgccttggccgagacggacgcgggcgcgctcaccggtcggcgctgctgctgctgatgttgctgctggatcatgagctgctgggcaagccatggcgatggcagggccttgtccgagccgaggcgcttcttgaagccgctcaggtcggtcatcggcggcttgtactgaggagcagggggccaggtttcagcaagagcgagccttaaactagacgccaggaactcacctgcggaaagaaggtgcggaggtcggctcggagcagaaccgtcaacccggcacgggccttcttgttttgaacctttaggcaaaaggaggacgagtcgtcagcatccagtttggcaccagtcagagcggtcggatttacgttgagcgaggcgacgacagcttgagcgccttcgagcgacgaccagacgccgttcatgagtccgccgtggttgccccactcgacgagcgtcttggatggcgcgtgcgcggccggcagccggcgaccaatctcggcttcgctcaactcgaggtcacggatgtgggtgaggagcgtgaggttaatctcgtcgctgtccatccggcgggcaacgaggacaaagtcgttctccttgtcgctgtaggcaatcttgacgcagtagaccgggactgccacgcaagggagggtagcagagtaagctaagggcgcgcagctggtctccaagcagaacgagaacgcaccaccgcagatggtcgtcgacatgaccttggcgggctcaggcaggaggggcactgtcgagcagataatcgtgtatcgcggtgtcggcggcggcgaggggccattcgaggtcggggctgacgctgaagtcacgccacccgccgcagaggccggccgggtaggaccagcgcgagcgggtccagcggccgacgatgaaagcgagccttgtactggccgagggtagacggggtgcggaggtggcgggtcgcgggtcgccgtcgtcgcttgagatcgggcggcgggtttcaaggggccgggaacgggtcggacaagtgctgagaccaacgccgctggtccaggagagcggcctgtagcaatgcccgaagtgggtgccgcgacggctggcacggccagagtgctagcactgggctgagacaaaggcgagggcaccgcagccgagtaggctgaggtcgtcgacggcattgagaccggcaggatcgactgctcgaccgtctgctcgtcgtcctcgtcctccatcccttcgagctcggcgtcgcagacgaggtcgcgcagatgtagaccgccaccgttccgagcaggctttgtcggtgcggcctgactgccagggagcgaggaagcagacgtcgcggccgtcgagccgagcggcgagagctccttgcgccgggcgagaggcgccggcagcggcttagggagcgagctcgtccggcggtgcttgatcgcacgggcccgaacagtagcgtcctcctcgtcgccagcaccggcggcagagtcgtcgccgccggcagagctcgcgcacgactcgccgaacgggtccgggcagatcatgacggccgtcgccgaccgggcgcgctcgacgagcgcctgggcaaaggcctccttctggcggcggatctcgctctgggcgaccgagtccatctcgtcgtcatcgtcgtcgtcgtcgtcgtcattgtcgagcccgtcgtcgtcgtaggcctggacgtcgtgcatgacgacgtcagtgtcgtccgacagcggcgatcgttcgtcggccaccaccgcggcaagaggcccgacggtcggccgtttgcgcttctttgagcccttggcacctcgaccgccagcgctccagacgcgttcgagctcctcgaggccgacgctttcgggcccaagaaagtcctcgtccatcagggagccgagcgcgccgcccgagccacctgccgcggtcccgccggctgaatgggcgtcgtcgtcggctgcgaggccggagtcgctgtcgacgctgccgtcgtgggcgagcccgaggccgaccggtgggctccgaggctcctcctttggtgcagttccgtcagcggcaacggccgcggcccactcgcccgctttggcgacggccgggtcaatgccgccaccgccgccggcagcagcttcgggactcgacacgcagccctcttcaaacggcggcgatggctctccttcatacgtctcgtacgtcgcgccgggctcgcagatcgagacggcgtcgacatagtcgtcgtcaaaggtgccctcacggcaagaccgatcgagcaggaccgacgacgacgaccggccgtggaggtggtggaacggcggcgagccgcccttgagcgacgagaggagcgcgaggtggagcggataagccgtctcgtcgtctgggtcggcaccctcggcaagcgactcgtggatcggcgccgaggctgccggctggaggaggagcggccgacccgagggcgaggtgacgcgtgacggggtcgactgcggaaagtaggagccagacgagccaccgccgcgccgccgaccgccgccgctgaggccgccgccactcttgctcgcggcctcgtcgtcatcgtcgtcgtcattgccgccgctgccgttggcccgggacgggtggttcggatggttgaagggcagcttgtcggacgggatcgagggcgaggccgtcggcgagagcacggccgggaacgagagcgtcatgcgcgtgtttgtcggaaggagcgagagcataaatggccgctggtgcgagccctcgtcggcctggcgccggaagtcgtcggctgtcggtcgccggttgcgcttgtcgggcgagccgccaccgagttcaccgaggtgaagctcgaccgatgactcgcggcgccggtgggcgtggccgccgttgctgctgccactgccgttcgggccgagaccgtttgaccggagccgggggctgccgagcgaggcgagaacctccatcggcgtcggcggcggcggcccgccgggtgtcgacgttgacgtgtaagctggtgggaggccggccggactccgcaagtcgcagcgctggccgttcgagtcgacgacggcggacgaggcaaagcccctcgggaggccagagggcgtgccgccggtcgctgacagacctgcaggcggcctggggtcaacgtccatcggctccgtcatgtcctcgtcgctctcgtcctcctccgacgacgcctccgtctcctcgtctccctcggacgaagacgacgagccgtccgacccgctctcgtcgtcgtcgtcgtcgacgtcctcgtcttccgacgaatagtccgagtcgtccactatcggttcggccggcctcgcagccgcggccgccggtgtcgggttgaccttgagcttgatcttgagcatcagcggcggagcttgctggggtgtaggcgccgccttggccttgtcgaacttggcctgctcgcgccgggccttcttctcggcccgctcgcgctccttcttgcctaccgggcccgcgacagcagcagacatcgctgtcgccgccgtcgacgcgccctccttgccgctgccggaggtgaatgtgtagagcgacgagaagcgctcgcggaggccttcgcggacgaacggatcgacctcgccggccgcctcggtcagaaaccagacggacccgcgcggcttctttggcttcgtgctggcggccagagcaggtgctggttcgccgccgttctcagccgccaccgccgccagtgcagcagcagcagcagcagccgccttcgccttgcccttgcccttaacggcatcccccgccagcgcaggcggcatcatgctcggatggagtgcgggtgccagaatccgctcggccgacgagcccgtcaggacgtgcttgtcgacgagcggccggcgcgaggcgggcgcgacggcggggagcttcgagtcgggcgcgatgccacaacgcttgaggtgggcgcggatcgcaccgtcgatcaggcgggtcgggtccgtcttggcgttgtcatccgccatgggtctgacgatacagaggcgaggttgtcagacggcagcaaagagagctcgagcggtaagacaaggacgcacgcgatccatccgcgagcaaggcactcttcggccagctgtccgacaagcatcgcccgattgttctgcagatgagcatgttgagaggcaacacaggtcagcaccgcaaaccgagcgaaaagggcaagaggtgcgaggcagacgcacgaggcttttgagtgcgccacagacggccatcaggaccgcgtcgtccctgtcgagcgcgtcgacgccggccggtaagatcttctgcgcgaggaaagggttgacgctcgggccctggctcgcggacgagcccgaaccggcgcctttggagcctacgccggcccgggcagtgggaccagagggggcagttgtggaagagctggcggggccggtcgtagataggccaggcgagggcagcgatggaccgcgggcggctactgcacctggctttgctggccgggatgagccggtgacggctgatgaaaccgatccagccaccgcagaggatgatggcggctcagtagcggcggaggcagccgcagctgctgctgccgctgctgccttgcccttaggtgctggtggcggaggcactgctgacgagcccgagccgctagcgacggcattgacctgcgccgaagccgagcgtgcgctcgtccggagcggcggcgtcggccccgacgaggatgacgcagcagcagcagtggccttcgtcggccgggtggatggggtcggtattggaggcaccgagccgcccggggcggcgccatcagccgctgctgccactgcaggcggcggtggaggtggtcgaccggtcggcgttggaggaccgcctccagtcgtcgctcgcgtacggagtgaccgcgtcgttggctggacggcggccttggacgccagcgccggcccagcggttatcgctgctgacgaagggcctccagccggcttggctgctgctgttgctgctgggccatggctcgcgggctcgagctcgggaagtgagtcgagaggcggtggcggtgggaggggaggtgtcggctgaacgacgacagcggcggtggtggatgatgaagctgccgctgccgacgaccgaggacgaagtgggcgctggctcggcgccgaaccgcctccgacaacggcggccgtcgctgccatcgtcgctgctgatgctgcgggcgttgatggcctggacgaggaccgacgagttgccacagccggcggcgttgctgctgctgctgctcctgccagaactggcattgctgctgaggcaggtggtccagcagcgcccgcggccgcccgggtcgagcgggtcgagcgggtcgcgggcgagcccggcgccggcggcgggctagcggccgccgctggcgacattcggacgggttgcaggttgttgcttggatgatctgtgcgggaggtcgttgcgagatcgtgaagaggaagtggtcgggccagcagaccacccgagaagaaagaacgaggagggggctgagtcggtgtcggtgtgtcgagagagcacgcgcaagagcggatcgcttcttcatcagcggaaaacgcacccagccagcgggcgcgcgcggggctcttctctacggtcgccaaacaagcggttacgagcgttcgtcacgcagtcggcgtaactcggcccgccgccgccgccggcacgacgaccgaccattcagccctcggccctctcacgtccttgcctccgcctgaggccatgctcgcacgcgaccaggaggacctcctccgtcggctcgaccggcgtattctctacccggtcagtccctccgtcgcgagcgatggcgacgcagctagcctatcgtcaacgctacccagaaggttgactgcggtcgggccagcccatcgtcccgcgctgacgtggtctgatctatctcgcataaacaaggttctggcggcctactgctgcagtcagtcctctaagtcatctctcaactcgctctaaatgccggcgatcggtcgaggaggtcgagcgcgggcgggttggcgtcgctcatcaacagcagcggtagcgcgctctcgcgccagagcgctctgcatccgacggtcgcgatcgtctgcgaggattgacgatcaagagcgacagcgtctccagctccgaggcccaagagcttagagctaccggctgagacgtgtccgtctgaccgatatcggcgagggctgcttctttgagccagctgggctgagctcgagcgggcgacgacgccgaggttgcttgcgctgaccctccctctcttgccaaccaagtgctgacaccgcctcgcctcctttcccgcactcgactctgaaaggctacgtcgatcggtccaacatctcgaacgcgctcacctcgctcgagcgctcgatcggcctcaccccgcgctactacgcgctctctgcgtacgtccctgcttccctcgccttcgtctcatcatgtcgcctggctgagccagatcgcttctactcacgccccctctcacgccccctccttttcctcctcagcgccctcttcaccctctccctcgtcctcgtcgagatcccttcgaatgccatcctaaaaaacgtcggcccacgcacctggctcgcgacgctcgtcgccggctgcgggatctgcacgatcgttcagggcgcggtcgggagctggcaggcgctcatcggagtgcggacggtgctcggcttgtttgagggtgcgtcggacggtcatccctagagcggcgtccatcacgcgcatgccttcctgacccctctatcccatctcgactctcatgctcccaggcggcgtctttcccggcgctctctttgccctcacactctactacccgcccgagcacctgacggtccgcatctcggccttcacgctcgctgcctcgttcgcctttgccgcgggggcctttctcgctggcgttttgctcccttgggggtcggatggctggcgcgcgctcttcgtcttccgtgcgtgctagtcctgaccgcgacgacccttgcgacccttcacgaagcgtcacctgtactgatacagtcctgttcgttttatccttgcttcccgttgctcgcagaaggcggcttgacgctagccgtctctcttgttctctacgccctcctcccagcctcatcgacccgcgcctcctccttcggtgcccacaaggctctggtcaaaggtggcaacgccgccgaggaggaagacgacgacgagtgcgagtcaaggttgtcgcgcagtggaggcgccgtcgatccgccggcattcctcccggcgcatctacgggcgctcttcagcctgatccacatgagccagccgctgtcgcctgccattcgaccctccagccactcacgagtcgacaacgaggacacctctggccagccagcccaaccatcagccgacgacctctcgagccgaccggccgccggccgttggccgcccctttttggcggacagctcgtccaccgctcgcgcgagccgagcccggaccgcgcaggcggcaacgcgttcgccgacgttggcgtctggcggccgacggcctcggccctcaacgcgagctcgacgacgacgacgccgcttctgacgacgccggccgaagaggggccgcctgggccggcggcggtggttgcgagggcgtacttctcaggcgcggccgtcgatgtggactccactccgagcaggccgaccagccgctcctcgtcagcttttgcacctgcaacttcatcagctgcggcctcagccgcctcgtcgatcggcacgacgctcctcgccccgctcacttgggtcctctcgctcgcctacctcttcctcctcctcgcgacgacgccatcgaccttcctcccgcgcctcctctcagcccgctgggccctctctgagcctgcggcaaataccgccgtcggcctcctttacaccctgggcggctgtggtcagtttgccgtcggttatattgctggtcggccggagggcccggggctgctgacgacctggcggagggcggcagcagcgacggtcgggtgctgggtgctcgtcgctgcgtacgaggccgcgctcgggggcgagggcgtcgttgcgttggaggcgagcaggagcagtagtgctggaggaaacgagctgggcggctgggaatgggtcggcccgcctgctgcacggtggacgggcgtccttcttcgactagctgccacgatgggtgcgtcccagacaaccagccctggtgatccgttgcgtggtccagctgacagcttactctctacacatgcagcgacgccgacgctcagctcgctctacctgagccatactgtctctctcccaaccacactcgtcccgaaccgggcgatcctcaccgcctgcgtcatctgtcagtccctacttcgcgaggctccatcatgacgagacttgctgacccgccttatgctttgtgcgctctagcaattggcaaccttgcccaggcgctcggcccgccgctctacgcttcgtgcctgccgctgctcgcctcacccgccttcccaggtgggacgccgacgccgacgccagacgctcctctgccgcccgacgacgtcccgcacatcgtcgcccgccgtcttctcgccctcgtatccgcccgctcttcgaacgacggctcggcctcgacagccgcagcgtcaactgtcggcttcgagtactggcgcggtctcgccgctcgagacctggcgatgggcctcgccgtcctcgtcacgtgggccgcagtcgagggcatcagccgctacgccgccagcgaggtcagccgccagcggctactcctccagcagcagcaacagacggagcgggaggcgtggacgagcagtggcagtcggagagggcggagcagatcgatagacgacggcgggcgaccgtcgtggaaggacaccgagcgcgaggaacaggctggcttgctggcgggcgacccgccctagaatcaatggtatcctatggctgaaggaagcggccctggctctgcagagaaagaagaacgcatggatcggggcactgagacggcggcggggtgactgcgtgcaggcggtcactgctgggagcttgagcttggctgccggtcgaaccgagggtcgcgtttttgggtcgtctgcgggatggcccgaccgaagggttgcgagccggccgcccgtgcgtttgaggcggcttgatgcgacggtgcggccgcttcccagctgctaaagaagcccggccgcgcatccgatgggatcggagccatgagggaagagtgcgggcctgaggccaggaccggctgctggttgaagaagaagtcttgcgcgcggagccgtggccggccggccatgggccggacagactagttgacatacgctggcgatagtggatgccgagcagaagccaccattgccggcggagctgcgcgagtaggcgctcgtacgcccttgagggccagcccttgctgcgcgggcggtcccggcggagcgaccggcttgaagggacccggcatggcgggagggggtgcaagcggggcgggccgctgacgagggtccttgggcttgagtgggcagggccgggcgatcgacggtcctgcgacgagcgagggcggcggcgggtacgaagggaccggcagcggggccgagacgacttgggccggcgttggcatgttcggccgcacatgggctgccggcggcgggggtattgcagctgacatcctcgccgctgtcgccactggcgaggacaccgacaacgaggacactagaggcgatgggcggtcgacagggcggacgactgttttcgcagcagggaccgccagacgtcatgtcgtgtcatccggcggcacgcgcagagtcgtcgccaaattcagtggtttgcgttaggagcggcgctggaggagttggcacagcaagcggcggtggcggcagtggtgggagcggcggcggcgagatagaaagcggccgaggctgcgactgggcgaaggccagctgaaccgaggctggcggcatcgacgtcgtttgtggcgtcttgacggccttggacgccgtgcctgccgtccggaccgcattttcggtcggcgccggagatgctggcgcaagtgggacaagcgcagcagccggcggcggcagcggcggcttgacgggcaaagagcgcggcacggggatgacaatcggcggtcgcacgaggacggcgagcgggtcgacctgcatgtcctcgtcgtcgtcgccgtctgacgaggtagcggtcatggcgacctcaggtccagccgctggaggagtcggtacacgtcggactgaagagacggatagactgcgcggctgcacgtcgatgcactcgaccggctgaggtaaaggcctcgcgcctcctcgaacggcagccaaggctaccgcaggagcgacgaccggcgccggcggctcgtcatccgaggacgagtcgtctgatgagggagacggcagcggcgggagatcgttcgagaagcgcggcggccaggcacggagcgcagcgatgaagtcggggtcggtccgtgcgatcccccgcacgacgtaccggccgacgggcaggtcgtaatctggcttcggcggcgcgagcgacttgcgcggcggccggagtgaccgaggaagcgggacgagcggtcgaggcggccagatcgtcgcgctcatcggttcaggcgcgggcgctcgggagaaccgagcgacaggtgctgaagagggcccgaccccgtcagcggcgcgacgccccttgccgcgctgactccggctcctcgacttgagcttctgttcggcagacgtcggattaccagtcttcatcttggagctgcatagaggtcgagccaagagacagctggccggcgtcagcttgcggccgggaggtcgctgtagtcgcacagggcgcgagcgcgagacgtaccggtcaagcggcgatcaaggcaggaagccaggcttgatcagagcaagtcgagcgaagcacgtcggcagggatgctgcttgatcaagagggaaaagagagagagagctgccggtcgaccgacctgcgagctcacgtcgctactcgattcgaaaggaagcgctgacccctctcctgaagactgctcgtagataggaggcggcgatcagctactgaccctgccttactcgaggtccgagcacagagacgtacctgatccaagagacctggtaaaggaagctgctgggagagagggcgaggcgaggtgagcgctggcggtcgacgaatgccggccgaagggtcgggcctcctgttgctgcgcgcgggcctcagcaggaggtcagtgcgtcgtccttttgacgacagggccgtcatcgcttcggtgatgagagcgcatggcataaaggggtggagagagggtcgtgagtcgtgagtgggacagagaggctggtctggaggaaaggggagggtcggcaaggggatgccgagaacactcgacatcaagttggcgtcgcccgcctaccggcgctccttcgtcagacgccgccgcatgatctcgagccggcgtccgaccgtcgccatcatcttttgctggtcagcaaggaggcgctcggcctgctcgatcgctgcgagatcgtcgttattgcggtcggccgcgaggatgtgctcaatgagctcgggcaaaacgcccgacgcagcgttcagtgcggcggtgagagatgtcggcatctcagtcgggtccgcctgctcctccttggagacgacgtctgctgcggagtcgatcgtgccagcgccgggcacagccggataaggtaagacggccgacgacggaccgactgtcgccggcggcggtatggcgagagcgtcgtcgagatccatcggctcggacttgacccggaacgggaggttggcaggcatgaccggcgttggcaacgagccgccgctgagggcgtcggcagggggcgccgagggcggcgtcaggcggggtacgaacgagagcgacggcgacggctcgggcgcggggtcgggccagccaagtgcgcgctcgcgctccttgagcggccgctcgtcgagccaagagatttggcagtagttccgatcgccacctggccacgaggtgtcgtcggccgaggtgacctgccagcccttggcttgaacgatatcgagctgcgtgtcacggaacgccttgcgggcgaccttgcccttgcagtcgctcgggtagggcaccgtccagatcccgaccgacgtgtcgagggtccagtcgatggcgagctcaccagcgatccactttgtcttcgtgacccgccggcactcgtttgagagctcgtgccgcttgatgaatttgaagcgctcgcggttgaggatgtagtcgttattgacgcgactcggacggcagtcgaccggaaggtcgtcgagcgaccagctgctgacgccgctcggcgcccagggcggcggaggagcaggcgccgacgcaggagactcgggtcgattgagggcgatgacaggcttgacgtcgggggcgtcgggcgcagcggtctcgagcgaggccgccgagggggtctgcaagcgggccaagtggggaggtcgtcagaacgagagtctgggcggcagcttgagcgccgggtgccacgtaccgccaggacctccttcagcggctcatccttatcggtcactacgggcgacggcgaagcgagaccaggtgcctgctcgcgcgtccgccggtccctcgggtcgacaggccgccgggcccagttagcctgctcttcctcccggcgcatgcggtcgtcgtcgcggacgtccggctgaggcgtctcattccaagagctccagccgtcgctcggctgacgagtcgcgctccagccgccgctcggaccccactcgtcagccggcggcggtgacggcggggccgacttgggaggaagaggcggaggcggcggcggcggcggcggcatgggtgcgacggcggcctcacgcatgtgggcgtcacgcttgcgccgctgctgccggagcgcctcaaagtgctcgagcgcctggaccttccgcccggactgagctgggacgaccgctgcggacatcgaagccagggctggaacgactggcggcggcgatggcaaaagcaacgggggacgctccgacggctcgggcgggagtcgtcctcgggcggcctcgacggcagcaccggacctcttgtgcggcagccggccgccgagcgggttgccgtccgagtcctccgagtcgctcatgtcttcccagccgtacgaccggtgcgggcgccggtcatcaaccgagtcgtccgacttatccgacgagcccggcgcgcgctggtccatccggcccttgcttggccgcttgccaaagtcgacgttgcccttgaggcgcgtccgcttgcgcttcgacctgccccagttctcgggcgcacccggcggccgctcgccgccgccagtcgggtcgatcagaggcggcgcaaccgatgttggtcgcgagtggccgcgagtcgacacggaaggcgcccggcccgggccgccgcctatcttgtcgtcctccgagtcgtccattgagtcgttgctgtagccagagggaccggcggccgatgtgttcgctgccggcatcgtgtttgcccaccgaccgttggcagctgccgttgcccccttcatctccttcttccgcttgctgccgccgccagcggtaccgttttggtagtagggctggccgttgctcggcgctggccgaccggcgacttgaggcgggggcacgtacgacggcgtgccgtaccggtcgccgaagccggagggcgagttatcgccgcggctgctgctgccgccgacaccgttcggtgggaccgacgccggagggtgatagtcctgccggtacggctgggcctgcgcctgcggagttgcggaccggacgcgctgcgagtgcggcggggggatgtaggcgcccgtcggcggccgatactcgaggaagccctcagtcgtcggatcgccaaagcgctcgacgatctccctcttgcgccggaagtggtcaaacgagaagcctcggaggcccatcgtgcggggagcgagcgggcgagcgagcgagcgcgagctgcagcgactgcccaattcaggcggtagggcatcagcaggtcagctcgcgcgatgagcttggcggtgcagagatttgatcgaattacatgatctgctgccctgtcgagcggtgctgctgttgctggataggcggagagggtggacgatggttgacggcgagacggaaggcaaggcaagagggagcggggcaggagcggccgtcgacgcgcaggcggcgcgcgcgcgtcgatgcgtcgtcgatggatggcgcgaggcactcatgggccgtctcgccactgagggagaggcgagagttatgagaagcaggcatgagatcgtatgaacagaaggtcgggcgaatcgcgtgtatgcggagggcgagctacgatgataagagaggacgagccttaggcgtcgctccaatcttcgtcaaagccctcctcggcactgagatcaacgacagagaacccttgctggccagccgacgagaccgagagatccgagaggaaacccgacgagaacgagacgaccgaggacgagagcgagtcgccgtcgtcgtcgtcgccgcacgtcgtcgtcgaggcgaccgactcgggcgtcgtgaagcccgagtttgacgggcgggtcgaagtagcgcaggcggcagggaagatgaccgaggccgggaggagcggaaagacgagagacgacgtcgacgccaggcacgccgatgattcggccgcggacaacgacgacgagcctttgcgcgtttcgtgcaggctgaaccagctggcgtccgcagacctaggcccaaggatcgcccgcacctcgtcagtcgcccggccggtgaagatgacgcggacctcgtcctcgcccgcctcgacgcggacgttgtcgtcgagccaggcgccgcgccgttcgaggccgtggaggaggatgtcgaggcgcgaccgatgctgatcgtacgcctcgcggtggagcgttgcaagatgcgacagcgacgtggcggccggtgcgatacttgtgtgcagatctggcgcaagagggaggacgagcgtcgtcgtcgcccaaggcgagcgggcggtggggatcgcatgcgaggccgaagggccgaagaaggcgttgaagtcggcctcctcagcggcggcgacagcggcaaccttggaagccggagtgacagcctttgctttgatgatcgaagggccatcgatggcggacgggccgcgagtgagggtcgacgactggaagagcgacgacgagaccttggagctcgacgagcggttcttgccgtggccgttgagcttggcgtgggcagggcgtgtccgacgctgcttcttgaggtcctgcacctggtccttcagctcgtcgacaccggcgcgaagaaggactgcacgatgggaggggcgcggcgatggaggagtcagcctgagagcccggaggcagccgcgaaaagagaaaagtcacgacgtacgcggggcgttggcgacgaggttgttgaaaagcggctgggccgtgctggcaaagcctcgagcctggctaagaccgacagaggcgacgctcttgccggcggcgaagccagagcggaggccaggtcccatcggtccccgaccgaggccgccggggccaaaccgccgggcctgctgcgcggcagggtggaacgacggccgggtgtgcagccggacgcgagaggcgaggtcggcaggtgcaggcggtgtcggagcccgaacggcgggcttggccgtcgagaagaggcgccgggcgagctggcggagggctgagaggggtgtggtgggaaggcgggcggtgtggtggagcggatggcgagtggccgagggcggtagtcggcgaggaagcgcggccggcttaagcagcgagctcggcgccggcaagcgcaagagggccttggggatgcccatactgtgctttgtagaaagtgaatggccgggtgggagagggcgagagcaagagaagctgtgccttctaaagagtcggagcggcggcctgccggagcgagcgggccgcgtcgtcggcgtgccgaggccggcttacgtactctgcctctgagcgattcggcagtcacaacccggccctcgcacttgctgcgaccttcgtagagcaccgctgagcaggatgcgagaaggatgcgctcagaaatggttgggacgaagagtcggtcggactgcttttgcgggcggcctgcgcaggcaacaacacctggaccccattcggaccgaacgaaaaagcaggactctggtcgagctggatcttcttctacttgacggatcgagacagatcgtcgccaggtcttccgcctgcccgatcccctcgttgaacacctcctccctgctgacagtcgcgtcgacaggagagcgcccgggcaaaagcgcgcgcgcgcgtctcgaaggtcgcccgcacgggcctctcccctttgacgccgaccgccacatcccttctttcttctcgctcctaccttagtccgacgccagaggtcctcaaggtcgcctcttgaccgacctcgcgccttccgttctgggtgcgctccgtctacgctccggctgatgctccggacggcctggcgggcggccaaggcgcgcgtcggcaacctcctcgcgagcggccgcccaccagctccccgaccgggcctgcgcgagcccacgtcccaggcgagcatggccatgacggcggctggcggctcggccgactcgaacccgctcgtgacgacctcgatcctcgagtttacgtctagcggcgagctcgagccgtcaaatacggaggaggtcatccgtcgctgggccttccgctgctcgaacaccaacctccagccggaacaccgaccgttcgaaccgagtaggtctcctctgctgccgctgcggctgagccttaggcagaagctgatccttgcgacccggtctttgcaggagactcgcaactccggcttcagcccgtcacccaggcccgcgacatccgatcggagctcctctaccagatcgacgctgcggcgaccgtcctgaatcaaggggacgcgccggagcagcccaagccactaagagcaccacccactgcggtcggccgaccaagcacatcagagacgccagtccccgaacagtggctgctcgacttccagcctgagcagccgagcttgacagcccggcctgtcgccgtcgtcgaggcgcccttgcctccgccgctcgacacgacgcaccaggacaacggcccgggcttcgctgcggcgaacgcgcttggacgaactactgaagggaagcaatggctctctaatgccaagcctgatccgatcccttccgaaggcctgcgtcggccaccgaggttagacgagtcgcccgacctcgagtcggctcgacccgggcgaagcagccggtcgaggagggcagcggaggtccctccagcttccctcgttgatctccttgctgagtcggccgaagcctggcagctcctcgcgcgctctgcgacgatgcccagcgctgagccgacgcttgcggcgtcagccgctctgcctgccgcggtcgtcgaccgaccacctccgccggccgacccgctgccggcgagcccagcggtcccgccgatagcggtttcgcgacccttctgggaccccaacagcgacctgctcgagtacatgccgccctcgctcgactcggtcaactcgattgagaagaacccagcagtcgaggcgatcgttgacgacggctcgagccccttcgacccgctcgcctttgacgctgttgacgactcgtcgttcgattggctcgactctctcgtctcttccttcggcacaccctcttctctggcaccctctctcaccgctaccggttcgctctccttcacatcgcctgccgtaccggtctcggaccgccctgtcgacgtcgagtcggccctcgctgcattggccgatgagccgccagccttctacgacaactttgacgtcacggatcttcttgacgcgtgccacgacaggcgcgactacaagactgccactcgtcgactgcggctgcacgtgctccggcagaagcgcgagcttctccagggcaagacaaaggccgagcagccgattgtcgaccatctcgacaaggtcggccacgccgactactacacgtaccagatcgcgcagaaggacctctacccgacgtatgaggagcagtatgcgcacgccatcgccttttggaagggcttcacccggaccgacatccggccgtcttacgaagacttcccggcctttgaggctgccaatattgcgccaaagcgcttcatgcggcataaggcgctgcagctcgccgccagaaagggctggctctcgccggaccacaaggacgtccggcggtcgcgcggctaccgcgtgtgggccaatcgctttgcgtggaccgagagggtcaagcaggcggtcgaacgcggctacctcgcgtccgtcgatcagcggctcaacagcgaggtccaccactgtccgttgcgccgatgccgctacccttcccttccgccggcggtcaccgactgaccctcccatcctcaacatttgcagtcatctctctcgccctccaccactacgacctcctcgtcgacgaggagcgcctcccgcatggtacgcagctgctcctcttccgttgccacagctgccggccgggctgactacctcacgcttgtgcttttgatcgccgcagcttctctcaagaacctcgcgattgaccacgaagttcagctcgaggtgctcaagcccatggcgcagatatcgagactcctccgtgttaccggccgctacagctcgactcgaaagtttgaggatgccgtcaagcggctgacgacggtccgtcctgcaaacggtcctcgcatcgactctaccctcatcagcttcgctgatgccaccttctccgcaacagcgcgtcatgagcgacaacatccagatgcccctcgactcaaagtggacggcagaggacatcacacgcgagattctcgagccccagttccggacgtggcagcgctcgctcggagattctctgccgatggaccgccttcatctgaccctcgacccggtcgatgacgagatgaccgaggtacgtctgccatcagcgtcgctcgctgatcgcgcgtgcactggacctgacaaccgactttccttgattgtcagatgacgtttgcctctgtccggcaagagatgatatcgtttgccatcgttgccgtcgccaaccgcctcgagctggtgcgtcaggtctgtctcatctgtccagagcccgccgccttgctgactttcagccggctcgccttgattctcggccgacacgctcagccacgccaggcgacgccgctctacgtcatccaaggcagcgaggagacgcggcacaacatctgccgcctcgaggccgagccagacaccggccactaccgcctccgcgccatcgccgaccggcgtgaagagtacgaacatgtgggcggcccgagcgatctccgttgcgactcagtcctcgcgccgctctcgtcgttcaacgtcccgtccggcgaagacatctaccagcccgagctccaggacgcactcgacctcgggccggtcaacccaaagatgtcatgggacgacctcggcaacgacaacgggcccaagacccggatcgaggcgaggtaagctgccttacactctggtgacggagccgaccgaggctgacttacccttctcacccctcagattcggcaagtttactttctcctcaaaccctggcttcggctttggcgttggccaggtccacgacctcgccgccgagctctcgagcaagcgcacttttactcccctgtgcgcgtcgcttctcggctcgattgttatttgcccgcggtcgctgaccccgcgtcacccttcgtttgcagaaccggcacggccgtcgaccggctgaagcgcgactggatcgccggcaaacgccagctcgagtacaatgtcttccaccgcatccagtatgtctcatcgtcgtgcctctcgatgccgacctccaagaaggcgctcgtctttgagtggcagcagaacccctgccgccggcggtggtcgggccttcgctccacccgtcggaagggcggccgtcggccgcggcagagtgtaagctgggacacgcaaactatgtgggctcgggatctcgacctccggacggccaacatcctcttccccaagcggtgcgacgatccttgccgcgcccttctcaggctggtgaatcgatcgctgacagccgccgcctggtgctcgccgcgtcttaacccagcaactttgacgccatcatctccaagattaagttgcgcaagatccatccgcgcgtcatcccgcgccggctgcggcgcgtcttccggctcgaccctgagcgctggctcgaccctaagaaccccaagaaggtgcaggagcggtgcgttgctgcccttcgtcgcaacatttcgcccctctccaagccgactgacctttccattcgccgcgctcgtttcagaactcgcgcctccaccccgagagcgctccggcacggcaagagtctctacgtgctcgataagaatgaggaggtcgagcggagcgtttacctcgtcgaggacgacgtcgggcccaacggtgagcggctggccgtcccttctggcctcgccggccgcaaggtcgtcgtcgagcgcatcacgtgccatctgacgggtgtcgagtcagagacaatcatcgtgcgtcctccggcccctccttgcttgaccctgggcctgcggtcgcttcgccaccggctgatgctcttgtccactcacgcacgcacagctcgaggccgacgacccgcgcgaaaagggctcgcacccggacgcctacctgcccgaagacatgctcaaggacgtcaaccacatgctctgcatggaggaccagtcgtggtgagagcggcggtggatatacggccagcacgagagactgcgcgcgccccgggcgcaggcggcactcgacgaactcgacgacgaacccaacaaaagcgggaggaccctccctcctcttcctctcgatcccaacccccctcccgtctggacggcggcgggcgaagaggtgctgctgacggcggcccgcgaggccgagaaggcctcgaaggcgcgctgctgcgagtcgaggaagtcgtcgagcgacagctggtcgagcacggacgagacatgggctgaggagaggacggttaggggcatctggagagagcaggcgagcggtgtgcgaggagaggcctgctggatgggggggaaggagatgatggaagatgagcgtcaggaggcgagagcactaacgagctgtcgcgacaaagatgcattgaagcgcttgtcaagtcagagtcgtccggctgatcggagcaggtgagcggtaaagcaggaggcttcggtacgtcggccgacaaggaagagggggcagaaggaggtcgaggttggcgggcaggagagaacgaccggccaatctctggcgggccaaagtgctggccgcggccaacggccaacaagggttccctcgacagcgcgacagcgagcgaccacctccttctccggtacagccggataaagcggctgacgggcggcaatctgccttccagctgctgggacatcaagaggaggggcagggaggcgtgggtcccgctcaccgctcaccatctctctcacccataccgcctgcgctcgcctgtcgcaacccctcttgacagccctctgcctgaagccaacccgccgctatgtcaacgggcggaccggctcgcgtcgtcgttgtcggctcgggaggtgcgcagaatacctccaggtcggttccagccagcggctgatcagtcggtcgctcccgtcagtgatcggcctcacctgcgccctcgtcctcgctcagcagagccactctgtccgtgtcgtcggccgcgacctcccatccgatacgtcttcgacggcctttgcctcgccctgggccgtgtgtgctctcttctcgcctccgcttgctcttccaggcgcgcgctgcctctgacaaccgtcctcctcgcagggtgcgacttggtttccgtacacgaccgaccctcggatatgccgctgggaggccgagaccttgtcagtcgccacctgactctcccggaatcaccgccatccagcattgacgtcagctggcaaccatttcgtagcaaacgctttatggtgcttaagcagacccacccagggctcgtcatgccgcttcccatggtgcgctacgcgacaaccgaagagggcctgctgaagcactggtaccggagtctcgtcccgaacgtgcgtctcagtcggggatgaggagtgatgaccgtccgagctgactgtctgcctttctctttgatagtatgggcaagtggacccgccgccgtcttgcccgccgacgaccaagtgcgtcgcattcgactcgttcagcgtcaatgcgccgcagtacctcctttggcttcagggcgagctggccgcactcggcgtccggatcgaccggcgcgaggtcggctcactcgacgaggcctttgcctgctttgatggggcgaccgtcgtcgtcaacgcgaccggcctcggcgctggcacgctcaagggcgtcgaggatgcgctcgtcgagccaatccgcggccagacgttgctcgtcttcgcgcccaacgtgacggcgagcatcatggactcgtcaagcgacgccgagagcttctacatcatccctcgcccgggcggtgaggtcattctcggcggctgctatgacaccggcagctgggacacgacagtcgatcacgcgctcgcgaggcgaatcctcgagcgctgctatcggctcgaccctcgcctgtcggacggccagggcccggatggcgtcaagattcttcagcacaacgtcggcctccggccgtcgcgacgaggtggcccgcgtcttgaggtcgagtctctcacaagcggtcggaaggtcgttcatgcgtacggaaacgggcctggaggctaccaaggtagctggggaatcgcgagcgaggttgcgaggctcgctggtgggggatcaacgagcagcgagacccgagcgaggctgtgatcctattgagccttcccgctggccgaacaccgccgctcctgctgtagttgtacctgatgtatgttgctccttatacgccagcctcaagaagatgagagcggccccttctgatcaactggccggcaaggggagcggcgcgctggtcctgcggcctgaggtcggcgggctgctgcgcgagtcgctgcagcctgcgccggcgcctttcgcccttctcctgccccttgcttcctctttgcacctcctttgtgtcgctcacagagcatggggtcgggaccggcttggagagcagtctagcgaccaataatagcacgcgtcatcgacgtcgttgcaaggaggagcagcggcgacgaccgaagcgagccgggcactcaacgccaaaacgccgccctcttcccgcccgccttcgctcccttgcttcgacggtcgacgcctcctcgtcccgccctcttcctccagccagcatccacctgctctctgcacatgccgtccgctcgcccgtgaccgcctgactgagcgccctccgacgtccggacgccgcttgctccgctccttccgtcggcaggggcgcataaaacccgtcgagctcgacctccgcctcgcgtccgcctggcggcgccttgtcaacagtcgatcaacaagcagtcggtgagcctaccttgccgtctagccttcaagggatctctgtactgatgccgtaaccgcctcccgcagctcgatgtacccgatcaccgaaggatgcagccgtgagaagagacgacaagcccgccaggcaccccgtgcgtaccacgcgccgcctgactgcacctgcctcgatgcccgcctcctcgctggcctctagcgacagagattgacagccatgtggactgacctgaacccttctcgcccggcttatcaggcagcaatgaccgtcagcgtcctcgtctcgacggccagcccgacctcaccggcaagaattgcagcgcatacacccctgggcgcgacgacgtccgctcggccgactatctcttcgtacgtcccctgtcaacctgcgccctgcgctcggcagcattccgccgctcgaccttagtgtcagccctttacgaatcacgcaagcgtcaacgacgtcggccatcggacgcttgcctgcgccgcccgctcgcctgctggtcagcctgatcggtgactcgacctggcctgttgacttcggctcagaggcgcacatgggcagagtcttcgcccacgagcctgcgcatgcgtatgcgctcgtcgacggacgggggttgaggtttcagatgtctgcgccgcacgcgttgctcggcataggagggctcctgaaggggggccggccgtacgcacgaagtctgtcactgactttcttttggagtctcccgtcctcagacgaggagtcgcgaaggtcaagcgagctacatcagcgccggtcgtcgcacgccgacggtcggatgctcgctcgaccggcgagcttaagacgagtcggcccgtaagcgcgtcctcgccctcgtctggccggaccaaaggcaggcgggctcgcccagctcgagcgatcaacaggtgcggcaggtcgagagatcgtccagctcgggctggggtcggccgcgcctcggcgcttgctggccgggggtctgccgacgtggcacgtgccaggtcgcgcacgacctggagggtgggcggctggccgtagggcttccctgggaggtctaaaggcaggtgaagcggcggcgggagaagctgctgatgctggagctgcgatttggccgagctgccggcctgccttgcgtgagcggaggggcaagaggggaggagggaggggggcatgctgccggccggcccgctctgttgagggattgacccctccccttctctcctcagctgtcgtcgtcgcccggggtggtcgttggcaggaagggctggcagctggtcgctgctgctggcggctgacccgctctgctgacgcgatgtttgggccccagggaacgcgacgcgtcgtgtgaagagggagggagcgcaaggcaccgtcttggcgggggcgcgcaacgaggcacgcctcctccaacctgccctcccctcgtgtccccttggatacctgacgctcgttcttcgcagactgtgctcgctgacggtcgctgatcctaaagctgctacgtctcatcgcgctcgagagggagggtgcgcacctggccccctcgcacggggtgatggtccgtcaacaggcctcccgcttgaaatcgcctgccgcggccgcaggagaggccgaatcgtctaaaggcggccttccagaggccgacgcgccttcttttccccctcacccccttctactcgcttctccctttctatttgtcagaaccgacttagccgaaaaagcaacgagaatgtcgaccgccttcaacatcaatgacaagaataacgccgctaaggccaaggtcaacgatgacgacggtacgccgtctgccgtcatggtccgccgcggcgtcgtcgtcggcggcggtagccagcagcagccgaagccagtcatggtcttgcatccgatcgtcacttcgtctgccgctgctgctgctgctgccgtcggcgtcgccaagggccgtgcagcaaagaaccttacagcttccgccgctagccggtgcgctgatgagacgaaggacgaggccgggcgccggtcgcttgactctgaggtcagccttcttctcgcgcagatgaaggccaaggtcaacaagacaaacaagaacaacaccaagaacaccaagaagtgttcggccatcccttggtcgtgggggtaggctacgtctcgctggcccagctggcaggcaaggaagctcgctcggccgtccatgagcgggtggccgggcacaacgatccgtcgaccgcttccgctctcgcttctatctctgcccctgtctctgcttctgcctctttctctgcctttgtctctgtctctgtctctacctttgcctcacttctcgtcataccagccggagccctgcgccgggcgaaccaaagcactacccgagcacgctggccaagccgcggcgcttctgtctccccgtcatcccgcctcctgcgcccgcgaagcgaccgatgggctgtcgcccgacggcccagatgaagccggtccggttcccgctcgagctcctccagtgcgtttctcctcctcctcttcctcctctctatagtgctccgctgactcgactggagcgtccttcccggcagactgcctatccctcaacaggaagtcctaaatcgagcgtcacccatgacggcagcctcttccgaaaggaagtctagtgcatcttgctatactctgcgccgactctacgacaccgctgccctctgctgacctgatctcctcccccccttccttctcagcccctcaaaacctcaagcgggcctcaagaagccggcgggtcggcaaacatgtgcccatttgccgacccgctcggtggtactcgctcggctggccgacctggtccgttggactgggcctgtcaacgagtagggacgcgctttcccgtcttcttcccctcgctcgctcgctgcctccctccctccctccctgcttccttccctctgtcgtgcactccctcgcttcctcgctccctcgctccctcattccccccggtcaggcgacgcctgccgtccgatgccacatgctatctcgtctgaactcgcccttcgtcgatcggcgactctccatcatcgtctctgaggagccttcagcgaaaagcgagcgagttctgacgaccgacgggggctgcaccggtcgtctgacccagcacgacgcctgaggcctgccctgagttcgctcaagcagcatctattgcgctgccgggagtgtcgccagccgcgcacggaggcgctcgatctcctccacccgccgctcgaggtctgaccggcgcttgacgacgagggcctccatgccctcgacagcgacccggggtcgcgcgagcagcgcatccgacacgatctcgtgcgtgtttttctacgaaggaggagcggtatcagcgtcagctcgggtagcgagtgcacgagatccggtcggaagggtgagacgcacttgcagatcctcctcgaggccgtcctggatgcggtcaaagtcgagccaaaacttgcgcttggccttctcccaccgagccatcccgaatcgaaggcccagcgccgttccgagcgcaccgaccgccactgcgccctctgcgctcgcgagctccgcgaaccagccagcgtagccgcctccgagcgacgttgccgagatggcgtacgctgcccggaccgcgttctgcgcgcggagctggaggatggatacgggccctccctgggcagagaggagctggctcagccggccctggacgggaccaagaagaaggccaggcgtgatgggcgggaggcgagggaggtcgttgacaaggacggcagagtgaagcgaggggtgcggaggggtcgagagcgtccgattgagcgaggacgcgagcgattgctggaggaccgagaggacgcccgtctggaagatgagctgaaaaggaataagttgcgtcagcctcggagtttgacgcgatctgaagcctcacacgacgtactagacgctcgccctcgcccccccagcctatccggatggcatcgccgacttcctggccgacgtcgtcgacccggcccttggccgccatgccaagccagccgaaacgggcgaggacaatcgaaactgccgcccgaacgtcgcccacaacctcctccgagacgcgccgctcagccccagaagcgacctgccctcccttgccgtcggcatgaccggccccgatgacgccgaccttcggcgggacggcgagcgccttgacgaaaaattgggtcgcgagttgcgctgcgttcgctgcgagagccttggccgcgagcgaccacttctggaggtagttgtcgaacgcgagcaggtcgaaccgggccgagtcaagtgcgaggtcgacgaggaaaggcaggacggcagcctcttccgcgaaaggcgcggcagtgggcgaagaaggattggcgagcgtgaattggagggcggcaatgttggagccgacgaccttgtcggtgaactcgctcagctcgcgcgctttctcctcggccgcccgcggaccggctgcgctcgaagcgagcccacttcgccgccaggcttcgtagccctcggaagcgagcccgacgtcgacccaagtgacgacgccggccgctgcaaagcggcgcattgcgtctggctcaaagccgacgagctggccgacttcggtcgcgaagcgcgagagctcggcctttgtcggcccgtcggtcgcgagcgagctgctggtcgatcggccgccgacgcggttgacgacgaccttgaggttcgggtggcggagaagtgcttgaaggacgcttgcgtccgcctttggcgcgggcccgccgaagcttgctccgctggctgaggctgaggggttcgtcaatggcccgaggaggcggagtgagtcgagcacgagcactggggccggggcgagcagaagcgagacgagcgctttgaccggctgagtggagggaggaagatacacaagctccagcgcaggcgacgtctgcaggaagggcgcggacgaagcgaggcggaacgaggagccagaggctgtgggcgaaggcgcagtgccgtacctggaggagaggcgccagccgtcagactgtctggcgtcgagaggggtactcgcagacggtctgcttactcaatgctgaccgcctcggccttggctggccggatgatcatctccacgaccgccgcgcgctggacgtccgtgctctcatctgcgagagggtcctcgaggagcgcgagcagcacctcgtcggcgcctgtgagcggcgcaccgtacactgcgacgtgatgaatacaagccagcaacgcgggatcagtgcggcgttctgaacctgcgagaggcaccagccagatagccagacggacccgtcacctcgcgcttcagtggcgacacttgcccaggtcggttggcggcgtgcctcgccgggccgaggacgatccgcggcctgtcgcgctcgacgcggtcgtcgagcctcgtgagcgcccgttcgagccggcgctgccaggccgagtcggccttggtgagctcgtcgacgtgcgagagggccagggccgtctcgctcaggagcgtccggagcgggttggccgccgctgcgggtgatggagggcgcgccggggcggagctcgacgagggcagggtcgacgcgagccgggttgctggtgccagcgtcgtcggccgagcgaggagcgaccggcgggctgccgaagaggtcggtccgcgcatctgctctaagtgttctgacgaggagggccgagggacttcgtgactggtcgtcggtgacctgcgacgcctcgtcgtctcgtcgtccttccgagctagggttactgtcgtcgcctcgctggagtgcgccgccgtcctcctgggcatctccggcccgacatcgacctccttgacctccttgatctctcttccaagccacaccgccaccctcagagatcccaacagcaagactctgcattcgcctccctagctcccgcctccgatggaccactttccgctctcctggggccggccccgcaacgacgccgcgcccgacctcttcaacgcctcgtcggccgggtcataccggcctcagaactgggaggccaaggcgttcgacggcggccgacacggaggaggccagcatactgtcgagggcgcggttggacacactcagtgagtcttccttgtaggcgtgttgactggggtgggacggagctcagggcgaaagcggcagcagcgagggggtagccgccagggcgtcgcttgactgggcatcaagctgcccgactcgtaccaggcaaggatatcgctgcggatgacggggcaacagcgcagagctgcgctgctggcgatgagggcatgccgtcgtctttgccgggcgagctgcatccatcacttgatccctggccgaccctcccaccatgctacccctaccatcttctgacgccctgcgtctcgcccttcgtaggtcacccatcgtcaccggtacctcggtccttgctctcaagttcaaggatggcgtcatgctcgcggccgacaacctggcttcgtacggctcgctcgcccgcttcaaggacgtcgagcggctcaaggccgttggcgagtacacggtcatcggtgccggaggcgacatgagtgattttcagcacctcgagaagaccctcgagtcgcttgtgtgagtggcccttcatgaattgctaggtctcgagggagacctggcagagcgccactgaagctgaccatcccttcccacccgggcagcatcaacgagtcgaacgcctcggacggccacgcgctcggcccgaccgaggtctacaactacctctcgaagctgatgtacgcccggcggacaaagatgaacccgctctggaacacgcttctcgttggcggcgtccgcaagggcgagcgcttcctcggctatgtcgacctgatcggaacgacgtacacagcgagcacattggcgacgggttacggagcgtacatgtgcgttcccttaccgatcgctcacctcttgctccgctttttggatggctgactctctctttcgcttcacagcgctcagccgttgctgcgcaaggcggtcgagggcaacgaggacacgctcacgcgcgagcaggcgaccaacatcatgaaggagtgcatgaaggtcctgttctaccgggacgcccggtcgcttaacaaggtacgttttcgccatccgccggccctccgacccccctttgcatccaccggctcgacccgacctttcctcacgctgacctcttgccgctcgtctcgccgctagttccaaattgcaaccgtcaccgagtccggggtcgaaatctccgagagcatgaagtcggagacgcagtgggcgtttgccgagggcctgcgagggtacgggaactcgagcgagacgatctgagcgtctcgcggtccgcctttcgcttgtctatccgcatgagactctgatgacgtacgaatctaccgccggcagccgaggggttgctgagggcggacgaggcagatctggttggatcggctgacaagcgctgtctgctgatctgcactcctacctccgacgctgacactagagcaaaggcgtcgaggcgaaaatgctcgcctcatgacagacaagacgaaatagttacaggccccctgggaggagccgccgacaagggataaagtgtccaaagagtacaaaagggagaggagtcacagcttaaacaatctatggagtgtcgttggaagggcgggccgcgccgaccggcacggcgcccgtctcgatccgctcgagcgccattcttgggctctgcctgccagacctttggcctcccgacctctggcccctcgaaggcgtcgaaggggccgtcactgatgcccgcccggaccagtcgccgcttcctaccgcgccgccgaccggccgttgccagcggtcttcgggtgcgagctcgagctcgagcatgccgccgtcgcttggccggtcgcctgctggcggaaagagacccttccggggcaagggtgcttgtcgccgcggtgtccgaccggcctcggtgggccgcgtgagggaatgggacgacggcaacgaaccgagtgttgccctcatactctgccacgcttcaagagccggtgtaattaggctgccaatcctcgaggatgctgacgcaaagctgcgagctggcgacaggcgactcgaccctgagcgcttgttcgagagcgagtcgcgccgctcgcgccctcctcccgacgctgggcgccagatcgagcctgagctcggcaccttcggcgatgaggcaggcatcggcaagggcgaaaagaggacggccgggacagtgttggcgaacgtgccaaagtaggcggaggagaggatgatggcagagccgaggatcgagaggatcgagatgtgttggccggcatgggtcaggacgagccggtcgacgagcccggagaagatgacctgtgagcggagacgagggcgccgtcagcgcagaggtggggagaaagctttcgacagagtccggcggcacctggagataaaggacgagacttcctcgaccggccttctcgccctggaggccaatggcgatgaggacctggccgcagagcgcaaggaagccggacgagagcagcaggaagaacgcatgccacgtcggcggaaggacgggccggatctggaagacaatcatgccactgcgagaattgaggaacggtttagcgggaagccttccgcagaagcgagtggataggactgacatgacggaggcaacgaccgacgagcccgagaaggcggcgacgatgtgcagcggatgtgaccgccggccaatggcggcgatgatggtgtctgcgtcacagagtgaaggcctcgcgattagcataggattgtcgaaagcagccgtgcgactggctctacccacaggctgccgacgcgctgacgactccgagcaaaccgaggccgatggcgaacttgctctcgccgatgccccagccggcgccaaatgtctcgcccgactcggagacgagcaggtcctcgtcgcggcctccaaagagggcgtggggctttgtgatgaagacgacgccgatgaggctcgtcaaagccgagagcagctcgcgcggggtgaagggctcgccgagaaacaggtggcccatgaagccggtgaggcagggcgtcaggaacgagagggtcgtcgagtccgacctggagagggcaggcgcagcagggacgtcagtctcacgtctattggatgagcgactgagacctacacacagggtcaggtaccccaagctgtggtagacggcgaagctgacgccgaggaagcccgtgattcctctgaggagcagcaggccgcgcactcccggcgggccgaggaacgggtgctggatccggttgagcttgaggtaggctacgcagccgagatacgtgatgaggaaccgcacagcgacgatctggatgcagcgaagcacgatgcgaccattaggaagcaggaggcgggggttatcagccgaggggccaacctgaaacggtcgtcgccgagcaagggctcgcctcgagcattgggatcgtcgtctggatcttggccggcgctagcagctcgagcacgacgttgtagaagctgaacgctagctgtccggccgcgaccagagggagacccatcgttgctgctgctgctgctacttctgctgctgcttgcggcaaagagaccagcggatgaggacgtgcgccaggggcaggctgccagagacgcgaccgcgcgacgacgcacctccgtcggtctatcgaagtcggcggccgtgactgttgtccagaccggtagcttgctcgtagcggtctgtatgcacgactctgacacaggatcctcctgctttagaaaggaggtggcggtcgtgctgaagctgctgctgttcggagcgtcgcggctgagagccgcgtcggcgggcgccgccgacccgttcggaagtaagcaggacgccacgatggcttgagctcgacagctctcctgcctcaggccactattgcaaagcactactggagctcgggcgtagcgacaacgacgatgttcgagctgaccaccgacctcctcctccggctccggtcgcttgggagggggggaagctgatgctgtcggtgcacgcctctccagcgcctccttgtttagtggctgacacctcggcgaccccgacccggttcccgtcgtctcgtccccaagacgacgcagctctctggcgaccgacacgcatggcccaacctcccaacttgccgaggtccgtccgctcgaagaaccttgggaggacttaggctgcaattcgcgtcggcagccgtcgtttgcctgctcttccctgttgagggaaggaagggacgcgaccgcgcgtgacctcctgctctacgggtcgtcgtctattacggccctcccaagcgtgttaggccagaggggagggctgcctggccagcaggagcgggggcttcccggcgcatctcgcccaccgaggagccgaccgatgacttggtaccctgctagcgcgtcgctgccagtgccccccggagctggccgccgtccgaacctcggtcgaccctgaccttggcggacgctgtgccatttgaggcggcacgaccgccgacgcctctgacccttctcccccacctcccacttaccagatctctgccgcttctcagcagctgtcctccaagatggctcccactgccgccgccaacgacaacgccggaggcatcccggtgcgtcctggtttagctcaccttccccctcctccctcgtcgctgacgaccggcaacttcgtccacccatccgttgcatctctctgcagcccgagatcgaagcccatgtctaccgcgggtcatggtggaagcacaagggtgcgtcgaggccgacgtcggctggaggccgctggctgcggggaccgtcggctgacaccgagccatctcgaactcgacctcctcgatctcgactcctacaggcatccgcagcatcaacatgcttctgctcatcgccctcatcacgtccagcacgaatggctacgacggtagcatgatgaacggtctccaggccctgacgaactggaagaacaaggtgcgactcgctctcctcccgaccccttgcgccgaccccctgaccctcctccccccgttcccctcagttcaatgacccgtccggagggacgaaaggacttctcaatgccattcaaaatagtgagtgctgttcttctgaagacagctcgcagagctcacgctgatttccgccgctttcgcccatctgcgccgctatcctctcccgtcctaaagtcggtgccatcatcggccttgtgcgtgatgcctctggtcccctgacgatctagaagggtccccttggatcacgactgacgcgtgcctcttccactcctttttaaatccgtcgtgtttctcgtgtagccgcttgcgccgtatatcactgacggcctcggacgtcgcgccggcattctcattggctcgctcatcatgctcgcgggcgtcgcgatgcaggcgacgtgcaacacgattggcgtcttcatcgcctctcggggcctcattggctttggcttgacgtttgcgacgaatgcggcgccgattctcatcgtcgagcttgcgtatccgacgcagcgcgcgcccatcaccgcgctctacaactcgttcgtctcctgttccttggactcttcgtctgctccggcttcatgttgaccctcctacctgcagcctctggtactcgggctcgatcgtgcgtagcctggcctgaagcgaccggctgactgcggctgatcacacgcctctgccccgctcgttgcagatcgctgcttggacgaccttcggcaccttccgcatccagaactcgatgtcttggcgcatcccttccattctacaggccgtgccgtccatcattcaggtcgcggtgagtggcctccgctttccgtccctgagcttttcttcgctgacgtctccttcccctccttgacggctgccagctgatctggtttgtgcccgagagccctcgttggtgcgtcgctctatctggagcctgattcgtgcccttcctccgcatcagagcgctgacttgcactcgacattgacaggctcgtctcgaagggcaagattcagcaggcgcgcaacgtcctcgctcggtaccataccgacgacaacgaccacgcccacccgctcgtcgactttgagatggccgagattgagacggccattcggcgcgagagcgccaacaccgtctcgtggggcagcatcttccgcagccgaggtaacctcagacgcctaaggatcatcgttggcatcgcctgtgagtagcaggcgtccctagagcggctcgctgccggccgtcgagcgctgactgttctttcgccgcccagtcttctcccagtggagcggcaacggcctcgtctcttactacctgaccgacatcctgaactctgtcggcatcacatcgcagacgactcagactttgtacaacggcattctacaggttccgtccccccgtcttgatcttttcttggtaagaactttcaactgacttaccgcccgcgacagatcgtcaacatggctactgctgtaggcgcagccatgctgtgcgacaagttcggccggcgcccgctcttcctctggtgcatgagcggcatgcttgtcaccttcgtgtacatcccccattctctcactggcgtagctgggtgctcggctgctgacggcgacgttccctctgctgcagtgcttgggccatctgcggcacgctctacggcatcaaccccgagaatggcgctgccggccgcgccatcctcggcctcatcttcatctactacttctgttagtcgcccgccgtctttgcgccgcatgttagccactgctgaactccctgcctcgcacctgtacagtctacaacatgtccgtcccgcttgactgtcacccaaagttgctgagcgcgtcgtttgctgacctcctcgtcctcgtgacctcctgaactgcgacagcggtccgtcttctccattcgatctgccctatggctcgagaagttgcgtaactgacgatgcccctccagctctctcacctctcatcgtcgtttatacggttgaaatcacgccgacgaagatccgcgccaaagtgtcggtctctcgggtttgtctcttgccttgccttcccacgtcctgacgcggtgatggcctcgcaacccccctgcagcctttcactgtttaacttgacggtctcggcgagtttggtcttcgtacgttttcgtatccccttcgtccctctcgtccctctcgtccctctcgtccctctcgtccctctcgtccctctcgtcccgaaggccctgcgctgacgtttgctcatctctgggctcaatcaacagaaccagtgcgttccgtcgcaggccttgcttctccctcgctttagcggcatggcgctgacagccgctctaacttccagatacgtcaaccccattgcgctcgaaaagagtgcgtgtctaaactggactcgcctgtcgaccatcagactgcaggctgaccttctggaccttgcgcagtcggctggagatactactggtgagtcttatcgaatgctctcgatcgactcattttcgtcctttgattgacgctctgttttgcgtgcaacagggtctacgtcggctggctcacctttgagctcgtctacatctacttctacctcattgagaccaaggtgcgtcgagtagacctacaggagccgatgcccagctgctgaatctcctttccgcctcataagaaccgcaccctcgaagagacggcggcgcttttcgacggcgaggacgaggtcgagaagctcgcctacgaggctggtgccgaagcccgccggaccgacagcccgtcgtcaggcgagaagggcaagatggagactgcgcactacgagcaccaacgcgcgtgaccagccctctgccctgtacgttttggctaagatctcctcttgtcattactcgtcgctgacgcctggtgccttccgtcttctgccctgcttgcctcgactgcagcccgagctcgagctccatgtctacactcaggttgcggtggaagcccgaaggtacgagccgccttctctgcccattgctcgttggccggagctgacctccggtcgtaccctcaacctcgaacaggcatccgcctctcctcacgacctgtctagccgtctctccttccctgtctgccgtctctcggcgtgtaatttacttccaattatctcacagagactcgtctcacccgttgtgccttcttaatgacccttcccattttacaaccgacgaggcccgtgccgaaccgactttttgataacagcgcagagcgcaagactgacatacttagactctacggtatcagcggcttctcctctggaaagtggtcctttgctcgcaggcgctcagccttctcctgagcgagcacttcctctcgagacgggggcgggttggtctcgaaccagcagtcgatggcgcgctcgatgcccatgtcgggcacgtgtgatataagagaaggccgatcggctctacgatacgcaaagggagtgacaagcggtgttagagacgctctcgcagcgacgatgaggatgggagacgcacgactggagggtcacctcgagcgcggccaccagggcaactatgccgacgatggataatcttacccagaccggtaccagattgatgtcaaagccgggagacggcgttgactcatcggccggggcgtcggcgggcttcgccttcgagtctgagctgcgagtcttcggcggaggccgcgagcgacgcgggagcggcgcgagctccggcgacgtcggcggcgccggcgcgagcctactggaggtcgccggcagacctgcccgagaaggcttgctcgaggacgcgttcgagcttgccggctggcggcctccggctccgctcgtcggtcgggacgagggcgggggaggcgacgcgaagtgccggtgcgagcgcaggccggcggcgagcacagaggcggccggggcccttagacgatcagcgccacgagcagagacggtcgacagagcccttgtagagctgcccggcacacccttcgaagcgagctggaccgaagaacgcgagatgggggcgaccgtgcgagcggccgctgcgggcccgaggagacgcgcgaggggcagtcggccggaggcaggcatgtcgtctcgtgtcgtcgagaggccaaagtgatgcagagtcggtgtcgagggcgtccggcacggcttcgtataagctccggctgatctcaatttgaactggtcgttggtagaaggctggagacgaggtcgagctggcggttcgtcggaggcaggaccgcgcacggcggcagcaagcagcagcatggccggccttgccccttcagccctgaccgtcgcccttcaccacttcgagtccctctcgacaaccttcttcttgcaaccggccagacggagatcaggccctcctgcgcttcgtccttgttcgtcgctccagctcgtccgtcggcccgggatgaccaactcgacgcgccgcatctcgtacgtcgtgccgttcccgccgaccccgccgccatggctccagctgccgtcgtcgacgcaccctcgcaacggctcgccctatccgctgctgttcccgtcggaccatccgccgctgtcttcgcatgcgtcgatcgatccgccctcggcccatccgcagcattcgctcggcgtgccggccatggcactcgacacgagcacgcagctcgccgcacaggagggcccgcaaggcatcctctacaccggcggccgcgacggcttgcttgcaggctgggagctcgacatgcgtctgcgcaggaggaccgcgctcgagggccatgcaggcgccggtaaagccgactgggtccgctggaacgagctcggcaacgatggcatcgacgacggcgccgacgacgagctgacagctggctcgggctcgggcgcgccaacgccgccgacgccctctgaccctcggacgagtgatggcgaaaagctgccgttcgaggatcgctgggaggtggacacgtacgccgagggcgaggtacgtctcttctgccggcaggcctgcatcgcccggcgccgaggccaggctccttccgctgacgatcttccgcgttgcacgctgcgctgtcgacccagaccgcaccaaaggcgaccttccgccagtcgtgccagttccacactgactgggtcaacgatattctactcaccaacctgaaccgcacgcgtacgtctgcctggaaggctttcgtcgctcagcaaacctgactgaccatgctgacgacgtcccgaccccccttcgcagtcatctctgcctcgtctgaccggacgatccgtgcctggtcgccgcactcgtcttcgtcggacgcatcgacgtcgtcgaccgtcatcggccatcacaccgacttcgtccgctgccttgcccactcgcgccaccagtcgtgggtcgcctcgggcggctttgaccgacacatcaagctctgggatgtctcgtccgcgtcgcttgcctcggtcagctcgggcggccacccgacaccgctgctcgtcctcaaccagtcggaggagcgaacggagaagtcgtcgatctactcgctcgcgaccaatgtccagggctcgatggtcgcgagcggctcgcccgagcagacggtcaatgtttgggacccaaggatgggtggcgccaagcgaatcgcaaagctcgtcggccacaccgacaatgtccggagcctgctcctgagcgaggacggccgcttcatgctgagcgggtcggccgacgcgaccattaagctctggtcgatgagtgctcgtgcgtcgttgggctctagcaccgccgactatttctgcccttctaacctgatccacgctcgccctttcgccagagcgcgtcatccacaccttcacccaccacgaggactcgatttggtcgctcgcgtcgactcacccaaacctcgaacgcttttacgccggcgaccggtcgggcactgtcagcgttaccgacatgtcgcgctgccaatccgttcccgaaggcgagtcgtacgtcctctgtcaggagggcgcagaccggacgcttaaccgcgagggcgaggcatcgctctcgcccctcgcctcgcgcggcagtgtcggcatcaacaagattgtcagcctcggcgaccagtgggtctggacgagcacgagctcgtcagacgtccatctgtggcaggacgtcggctcgcggacgcggcgcgttcccggcttccgaccggtccgggcgggtgatctcgaaggtgacgatgttgacgagggcgttgatgccgacgacggcgccgtcgacgaggacgagggcgagggcatgatggtcggtggcacgtggacacactcgccgcctgctcagccgatgtcgatcctcacgtcgccgtcgccgcctccgcccgagctgcaggctggaggtctgctcgcgaacgcaggcatggccaaacggctgtcgctcgaccgaacgccgtctcgcgaggttgcgtttgcgccccacctcgcaaacggcggcacctcttcaccgggcgggacgagcgccgcagcttcgttcgccaactcgcctctcgcgaacctccatcgtccgggcgtcggcctccaacactactcgtctgcgcgcaccgtgtccggtcagacggcgttgccgacaacttccaagccgtcgctcaacggcgtgccgtacgaatcgctcgtatcactcggccaacccgagtcgccctacagctcgtacggcgcgttccaccgttcacgctactcggtcggctcgaacggttcgctacctcgccgatcgtccctgcagccgtttgtcaacggcgactcggccaacccgacgccgacccagcggcatccagagctgcccgacgaggatgggccgtccctattcgcgcctctgcagccctctgctgctgttgcgggcgagagcgagcgcgaagcccgactcaacttcgaggagcatgaggttgttggcgacgccgttccgctccgatcagacccggccgacatcgtcaagggtcgaagcggcctggtccggagcttaatgctcaatgaccgccagcacgccatcacgctgtcgactgccggaggtctgtctacgtcgctcgctgcagctcggtttcgagagctgactgtcacccccgctcaacccttcagtcgtcgccgtctggaacatcgtcctcagcacgtgcctcggcctgatcgctcaagaggacgttctcgaggcgcacatccttgaccatgcgcccgcgcctgccccctctctgacgccgcgaggagcactcgagctcgtcaaggagcgcattgaaggcgaggccgtcgtcccggcctggtgcaccgtcgacacaaagatcggagcgctcggcatccacatggagcagggccgatgctttgacgccgagatccacctcgacgagctcggcgaccgcatccagggcgccttcagggaagatcagcgaggtgcgcctgccgccctccttgttgcaccgacttgacttcctgacgaccttccatcaatcgcagtctcgcttggcaagctcctcctcgccaacctcttctctggcttcgtcgacgccgaagtcgcacgttcgcgagcattgacaaagtcgtccgccactccaacgcccgcatctggcatctcgcgctcgtctgccccgacgcagatctcattctcgccgtcatccttcaagccgtccgggacgacgacgccgggcgctttgtcgtcgctcgccacgccagccatgacgccagccctcgcgcctgaagccggcgacttcttccggttcacgaccgacacgtcagccccgacgtcaccgggcgccaacggcgaggcagtcgagcaaccaccgacgccaaaggctgccgaccagcactcggatcaccacgggagccagccacagcagcccgagcgtgggcgcgactacttctcgatgggaggcctcgggcggtctgcctcctcgtcgacggcgtccaagcgcttctccatgggcgcaggatctcagtcggccagccttcagagctcggacgctcctccggcctcgccgacccaaccgacgtcggacgcgccgctaccgaccccgggcagcagcgtcaccacccctggcgggtcctttctcggcaagttcaagggcctgggcaagaacaagaaggccagtgcggcggcggtgacgacacctgccgtcgtcgcagagacagccgaggaagaggccgaagtgatcgaggaggacgacgaggtcagtctggtcggccgcggcgtccccatctcaggactttgctgattcgcctctacttcctccctaacagcacgccggcctctcagaggtcgaccgctaccagaagcgcgtcctcgccaacctcttctcgcgggaagtcacaccgccgaatccggccgaggtgcccttcatcgccgactttcccgacgcaaccatcttcatcgacgaggagtctaaggatgctggcgcctgggccgtcacctaccgtggcttggcttcgacgacggccgccgacctcgaaacgctcgagatggctctaccgacatgggtgctcgagttcctcctgacgggccggagcttgcacaaggagccggtcaagatcagcttcatcctccagcctgaggacaaagacgatttggacgagctgcctggagggtgcctgcccgatcggcgctcgagtcctgcagagcggctcccgtactgaccgccccttgcctcttgctctcctcagaaacaaccgcctatctgccaaccgggcactccgagctcgcaagatctcatcctacgtgcgtcgatcaaactgccggcctcctcagcctgcttctgaacgctgactttgccgctcgtcactcgctgctcgcaggtgatggaccgcctcggtatgggaatcccacgctcaagagccgtctcgctctcgggcaactctgccgccccgacacctcagggctcgccaaggtcacacaccgcccgcctgccgtcgctcggaggactgccgcctcccggcacgcgcgagcacctgaacgcgtctggcgaggacgaggacctccggccagaagacgtcatcgagctcgtctgcggcggtttcgtcgtcccacccaagatgacgctggctgcggtcaagcacgttttccgccagagcggcgacgtccagctcacattccgtcggaagcagcgggctgacctgctcttctgacaaggtccctggtgcgaggcgggcgcgtcgggtgcgcggccggaggggaggatctagacgcggggagactgttgttcgatagacctggttgtatccaaggccactgcctttggacgtctttagacgccggtagcaagagtccaggttggatcgagtctggctttgctgtcgacgagagcagggagaggccactcgcttaagtgagctacgcgaggcctcggttggtctgccatcaacggcgacagtctccagaccgtcctcgcctctgcaccgtcacttccgccctatctctagccctccgcttcttcacggagacctgcctgggagctcgacgcaggccttgacgacaagtcattcgagcagacgccccccttcgagccttcagccgcagcagcgtcgacctcgcctcggcccgaacatctcggctcggctcctctccttaggcgacctggaccgccttcaactcagcacgtacgttcgcttccgatctgtcgtctgactcctttaggacagccgctgataccgctcaattcgacaggccacttgtccggctgccctctaagatcctggacagcatcgtccgagccggcctcttgtcgaccgacctgcccatcctcgaggacgagctcgaggtcttgctcgccaaccgatctttccttgccagtcttacagctgtctgcaagagcttccgcgttggtcctctgcaactgaggcggttgtcaacgccctcgcgtagcgggctgacgcgagcccacctttgcgctgcgccgtcgcagaccatcgccaatccgctgctctactggttcctggtggtcaagactcgacggcggacctctctgctcgacacactgatgcagaacggccacctcggttcgcatgtccgcgaatttcatctcgtcgagccgaccgagacgtttggcctcgccttcctgcgcgagctcgcagccgtccccggcctcgtcaatctcgccggcatctcgaccatctcgcaacctcatgtcagggagggagacttcccgccgtctttttcgctccaccggcccacgttcaactcgagagggtcgtcgttcactctacccattgaatgctttcttggctcctcgctgcggcgggtcaacctcagcgacttcggccgcagtcctggttccttggtggcggacgaaccaaagctctctagcgacgctctgccaaacctcgtcgaccttcaaatcactttcaaaagctttcgtttgggccaggcggtcatcgtgctctctttgattgagcattgtgcgcctcgttcgcagacgcttcatctccgagtgaccgcctcgaccggcaacattttcatcggtcgtctcgacattgcgcagctctgcactcggctacgcgtcctctcgtgcaacatgtacgcctttgtccccacccctcaacaaccggccgagtcgagtcggtctggaggaagctcccgctcaacctccttctacttggcgacccgacattcgatgcttcggtgctgccgaaccaggcacgcgattgggcacatgccgtccagctgtgctctccgccgcggatcggcttggcttgctacgatgatggtcggcgaccgacggggagcgaaagcagatgcgtcacgccgtcgccgtcctgcgcaaagtcggttggcaaggtgtggcagaggaccggcttgctcggccgatcaacgattgactcttgcatgcccttaacgtctctgcgatttgccatatcctcacgatcgtcctcacgaccggactggctgaaagtcagggcgaccaggtgcaagagaggagcagtgcgcgcagcaaggccggcaggcgcggcgcacgcgacgacgcgagcccgccaggacgacgcgtcaagcagccgacgacgtccctttccctctgctcagctcccgctcgtgtcaagctcttccttaccttacatctcggacaagatgccaccctcgccgcacgctgcctcggcccactcggcctcgcgtgtgtcgaaagagtcgcgggcggccctgctcgcctggtttcacgcggcccgggcaaagcggtccatgccctggcgacgcctcccgcccgacggccagagccgggtcgagtatcgcaagcggcttgccaaagacggtcgactgggccagtgggcgtacgaggtacgtttgggggcttgagcagggttgggcttgactcgcaagcagcacctctcgctaacagctcgagctcggcttcgatcggcgcgtgcggcaggtcatgatcgccgagggtgagcgagccgttgttgagctggctctgtccgactggactcattctgacccagttctcttcgatagtgatgctccagcagacgcaggtttcgaccgtcatcccgtatttccaacgttggatggccaaggtgcgcgccctccgtcgcatcgcgaaccccccaatcggaagctacctctatcccgcgcagtgctgaccttctcgcccacgccaactccagtacccgacgatccaggatctcgccgccggctcgcaggaggaggtacacgccctctggtctggtctaggctgtcagtttttccgatccagcgagagcaacaagagctgccggctgacggtagatgtcgctgcttcccacctgctgcgcctcagactactcacgggcgacgcgtctcctgcttgctgcccagaagatcgtcgaggaatatgctggtgacctgccttcagatcccaaggacctgaaggagaacgtgcccggcgtcggtccttacactgccggtgcgatttcctcgattgtctacggcaacaacgtcccactggtgcgcccggacctcctccttttgatccctttgcctgcgggcgggctgaaaaagacgggctgtccttcttgcaggttgacggcaacgtccagcgcgtcttgtcgcgcatcctcggcatctacgccgatccgaaagcaaaggcgttcaacaccctggtctggtcgctggcgaaagatctcgtcgagcaggtcgaggaaggctcgggcggatgctggaacgagggcttgatggaggttagtctgctcgtggctgcactgtacagagcccgccccttcagcctccagcactgaccttgactggtctcccttgatcttggatcagctcggtgcgacgatctgccgcccaaccgacgccaagtgcgaggagtgcccagtctcggcatcttgtgtggcgttccaggaggtgagtcggccctgctacgggtcctgaggcgcctcaaaacttaaccttgacattacgatctcttgtcaggtcgccaaagttggcccgtcaaaggccgtcgaggtcgacatggaggacctttgctcgacgtgcgaaccggtgccgtccgaggaaaagtcaaagggcgtgtgcgccttcccgatgaaggctgtcaaaaagaagccgcgcgaggaggacacgcaggtgacggtcctcgagtggcgtgctcagggtaaagaggacgaagagggcttgttcctcgtcgtcaagcgggcagagaagggtgcgacgctctaccttaccttgctcagcccctgcgcgtctgactgactctctgttcactctaatcaccaggtctgctcgccgggctctacgaatttccctcgcacccgtacccggacgagacgcctttgtcgccggcctttgatgcggcggtcgtcagtctggtgtcatcgctgcttccgatcaaggcccggcttcctccaccgcagcaaatcgcccatcggggcagcgtattccaccagtactcgcacatttcgatgacgtatcacgtcagccacatggtcgtctgcgcgacgtcggccgcagctcctccagaggtcgcccgtggacgatgggtcgatcgggcgatgctcgagggcgacggcaagactgtcgacgtcaacatgggtacgggcggaaagaaatgctggacgctcgtctggtcggacgccaaagcgaagaagccggcaggcaagaaacgggcggcgtcggcaggcagcgctaagaaggaggttgcgctcgagaagggccaggctaagctcagctcggccttctttggcggtggcggtgggctgaaaaagcggaagacgctcggcgaagaatcaagcaccgagcaggctgtcgacgcagcatccgagtccgccgcggtaaagccggcgaagcaagctcgcggtcggtctgaggtcgtaaagaagcggacgacagtcgtcctcagcgacgaggacgaggacgacgtcgaggttctttaatgacccgctgcagttggactcatcgtgcaacgtcaggagaacggggctcatgcgattgggcaaagttggggctcgttcagaccagttcgtctgtgaagggacgttcaagggagtcagcgcgaccatagaggccgccagcacccggcgagaactcaccggcgtcgagcccaaacatgccaaggtggaattcgaagaggcgcgtgagcatgggccgcccgccgccgaaggtgatggcctggaggaggctggccgcgtagagccacttgttcttgctcgcctcgtcgccgacagccttccaggccccggcgaggagcaggcagatgcggatggtgacgccaggcaggacacttggggccgtgaccttgatcgcgctaagctcgtcttcgatcgagacagccgatccgacgctcccgaaagcaagtagaccgcacttggtggcctgcgcagcccactcgggacgaaagttcatgtcggggcagtcgcaggcgagcttgtaagcgaagtactgaggcagaggaggagtgcaagctcggtcagcttgagtgcctgctgctatgtccgttggccagcaggtaccacgacgtacggccagagactcccaggtcaggcacagatcgggatgcggagaccaggcagggtaagccgggtcgatcgagtgcttggcgtattcctcgagggcctggagccgccgagagaagacggtttcccaggcgagtgggtctcgggcgacggcaactttgggctcgagggctgcccactgcgtgccgacgtcatgcaggtcgtggcagtagctgccgcgcgagacggtgacctcggtgccggcgtcaatgtcggcttgggcccggatgaccagggcgtcgccaatgaagaagaggcagccgttcggtttctcgttgtggcagaagagcgacaacgggccgtaaagcgcatgagcgtggtcgttgatcggcgggcagccctctggccggaggggtttgacgggaactgagcagtgagtctgcacgacttcagtccgcgccgaatcgacgacccacgccggcaggtcgcccactgagcgcctgttggccgcgaggttagcgagcgggtagccggccggctcgcatgcgaattggtcgcccgcatacatgcagtcgagcgtcttcacaatggtaggatcgtcggccatcctgattggggggcaaaggctatcgtcagtcgcactgggtgtcgtgtgtcaaattttcatgacgaaccgggcgaagagcttatgggcgaggcctgcctcggtggctccatcgagcgccatggtgttgaagttgagagtctggaggtgcgcctcgtctgcacggcactcggatgcgtaacaggcggcgataggcgcagcaaggacgagcagctggccagcctcgatgtcggcccgagcaacgacgcaacggccgccgcctggttcctttgcctcgacatagagcgccgggtgaacggagtcggggaccgagatgtcggtgtcaatcagcgacacctcgagtagcgccggccagtcaatctcgccggtggaagcccaccgctgactggcctcgacaacttcgagaaggtcgtcaatatgctcgttcggcgccggacagagcaaccgggcctgttcgagacgctcctgcgcaagcgcccagagctgaagctcgttcgccgcagcgaccgaccggaggagggcactctggtgaagctcggtcgagtacgacgactggtcgagcgcgaggacggcgttggcgtcgtcaagcgcgccccgcttgagcccgagctcgctccggacctggctgcgggcgaggcgcatcgacgcgtgctccgcgagctggagaccgagggtgaaggcgcgctcggcagcgtagagccagcccttcttcgcgaagtcggtgccaatcttcttccacgtcttggccgtccgctttggcggagtgtcggacggggcgagcaccgaatcgtgccagacgaggccggtctcgtcggttgagagcacgtcgacgtcggtcggcgagtagcactggacgctgatgtcgccgcgtgcgtcgtcccgcaggcgcggcgccttgatcgcgaggaggctgcccttggggaaaagagcgtccagctcgccggctgacgcgcagacgttgaacggcaggccgtgaagctcgaccttgcatgcggtacccgacggatcttggcagacgagcacaagtccggagagcaggacagggagcgtgaccgtgcggacgagcaggtagtggtcaaactcgggcttgcgtaggagcagcgacttgagctcgatccgctcgagctcatgcagaccctttgtcgagtggtgcttgtgcgggtgcatctgctggatccgcaagcgcatcttgttggctcccgatccggtcaggaggtcagcccggcggagatcaaactcggcgacctcatcggcggcggggcggcctgcatgcgcgatggtccaccgagccggcaagaaatgctagtcagcagcagtcaggggagttgatgagcaagtgaaagcgacactgacaggcgtccgggctgaggcggtgagcgaagagaggatgggagaggcaagcctgtcagtctgtggctcgacaaaaaaaaggggttcgtgccccgagcaacgacgcgcgcgaagacacgggagacgcaccctggcttggcaggagggtccttgacgtcgcgctcgagctcatatgtgagcatgacgaggtactgctgctgctcgtggtcgtcgaagccaccgatcgaaatccgttcaaagcgccggacgaagtgctcgagctcgtgagcgaggtcggccgagccggcgctgctgctgtcgtcgtcgtcagttgtctcgagctcgtcgtcggctgcgtcgctgtcgctcagctcaggcagctgctgcaagtcgccggccggagcatttagcccgatgtcggcagacccatcgacggtcgaggtccagtcagaggaggccctcgagctctcgacgtcgtcgtctggcgatgccagctggtcgctcggagcgtgctggtcgagctcgaaggccgcctgctcgtcggcgtcgtcggacgaggtcgccgggttgtcagagggcgggtcgctggtgtcaccctcgggctgcatgctgaacgagggggctgaaatgtgatggacagaggaaggaaggcgagggggggctcgaaggcactatcgttttgcgcagcggcccgcgcgcgtcgaaacagccgacgacgtcccgcctgtcgcccctggatcgtgcgagataggataaggcccgcctgacgctaccggggctggtgcaagtgcgtcgctcatctcgatacgtgctgcgaacgggcgaggtgaggaggggagggtgggcggtggagcgccgagaggggtgaaggggggcacaggagacgaggcgacttgaccgccgccaggcaaggagaacggagggttgcggcggtcgtcaaggcgtcggtcgtgagcccgggtatgcggaggtgaatcgcaggagtgtggaggggcgagcaggcgccgaaatctaagtcgactcgggcgcgccggccgcctgctgggccgcctgctggcggaccggctcaaaatagggatgcgactgggcctccttggccgtcacacgctcctggtggtcgtaccgcagcagccggtcgaggaagtcgatcgcctcgttcgagatgaacctaaggttgcggccagcggccgtcagcaagccagctcggggatgccgggcggtcggtcgaggaggcgacttaccgttgattctctgaggtgatgaaccgactccacggcttgcgctggtaccggccgaggatctcgtcgtactgcgggtcgagatcgatgtcgtacttttcaaggtactgggcgtagtcggagcgagagcgcagggtcagcacaccgtgcagcgaagagagagcgataggcgagcgagacgcacagcgtaaagctcgtcagtgccgaggatcttggcaatcttggcgagctggtcgtagttgtcgtggccatggaagaagggctccttgcgaaagatctgcaaatggagggcggcgcggatggttagcggttcggtctccgttgcaaggccttgtagtaggcgggacgcaccatcgacgcaaacatgcagcctagactccacatgtcgaggctgtagtcgtactcctggaagtcgacgaggagctcgggccctttgaagtagcgcgacgcgacgcggacgttgtactctgtgcccgggtggtaaaactcggcgagcccccagtcgatcagccggagcgtccggcgctcgtggtcgatcatgatgttgtgcggcttgacgtcgcggtgcatgatgcccttcgagtgacagaagtcgagcgccttgagcagctctgcgggcagcaggcacaggcaagggggcgtcttcagcctcggcggacaattcgtaagggaaggttcgctagcgcaccaaagatgtaatagcggacgtcaaagtcggagagacgcgggtacaggaccttaaagtcggtgttattgatgtactcgaagacgatcgagggcgtcttcgactgcggcagcagaggatgaggcaaaggagacggtcagtcgcaagacgacttcgctcagctcgagctgcacgcacctgaacatcccggacgacgtcgagcaggctgatgacgttcggcccacccgccaggcacatgagaatcttgatctcgcgcttgatcttcttcttcttgactggcttgagcaccttgacaacgcactttgacgacgacgggagcgagatgccctcaaagacctggaaagcgagcaagagtggagcgctgtcagacgactagagtaacaaagccgagcgctgtccaaggatgcgcgcgtacctcagagtacttgcctgcgcgcgtcggagatagcgccaaagcgagcggtcagcgagctcttttgaaaggggaccatcgtcctcagatgtcgctgagccgacgcacctcgtccgaccttgcggatcacctcatagtgctcctggttgccccactggacctggaggttgtctgcgattcgaaggcgaagcccaccgaaagccaggagtgcgtcagctcgcggccttgtcgttcggtcgcgccatccaggccaggcccgagacgtcttgccctacgccaggcccaccacgagctttaagagcgacgctcccagccggcggagacctcaagcgttgctgaagcgcgcgatgaccggcttggtccagacgaacagcttagctgccgcgaccgcccagccgagccgggcggccgccggcgcctccgaccgagcctgagaaggacaagggcgtaccgtagtcccaccacgacttgcccatccgctcgttggcgtccgcgtacacgcgcgactgcgagggcgagaagcagagtcagcggcggatctaccttggccgacgacgacgccttcgggagcgcgtcgaggccgtgctgagagtcgaagaggggaacgcacgatgctccgtccacccgtcatgcctgctgcgtctgagatcgcgggcttgctgtccaaagggattaattgccagggagagggtcggcgaggagcagagctgcaggcaaaggcgagtcgaggacgagactgggcaagatgaacgagaggaggcagtcgagcgcgagtcgagcttgccctcgttgctggcagctgtcggcgacaaaacccaaacatcttgcccaggctccggggacggctgggtgtctgctcgatttcagctcgggcccctttccgcgcgggcgaacccctgacctcgacagagtagccaggtcgccctccgactcccgccttctctcgcaacgaccagcgcacgagatctcgtcgcccgagaacaagaatgacgaggagttgagcggctgatgcaagtgcgtctgcgttgcttgtctggcagctggcccggtggcggtggcggcatcgcgggccgccatctgcgccctcgccaccgtcgaccggctcgcgctctcgcccttgatgggcagaaggctgtgctgactgccgccttgacttctcacactctccagggcatgcgcctcgacagtgcgtccctacgcaggcttcctttggctcgactagagggattgagcgggctcccgctctcggcctgcgcgcggaagcatctccgacccctgttcctcggcaccggttgacctaatctatctcgctccctccatcctgcctactttcagagtacaccccgcgcacgagctacggactcaaaggccggccgatcaaggtcgacgtcaacgcctacgagctgcagtacggcggccgctcggccaagtgcgtgtcctcctgtctccgccgtcaccggccgtcgctccacctgccggctgacacgcgtcgaccttgcccacttgcagacccgtcttccactatgacgtcgacatggagccagtcttccgggccgcaaaccagaagaagccaaagggcctccgccagcgcgtctttgcgacgctcgaggagcaggagacgcacgcggccatcgccgctatggcatttgacggcgagaggaacgccttcaccgtcgtctccctcggcaagaagaagactgaatttgtcgtcgacctgccagacctcgacggtccgccgcctcctgctccgacctccaagccgctcccgtccggcgcggcgccgaaggccagcgccaagaaggccgcaaaggcaggcgcaggcggcggtccgaggaaggacgaggtcgaccgtgccgagcgccgcaagtggacggtgacgctcaccgatctccagcggatcgacgcgagtgtcctccaggagtactcgaagggctcggcacaggcggcccaggtccaaggcgtcgcctttacgacaatcatggcgctcaacgtcctcctccgggccgaccctgcacggagccatacgcccgtcggcggcggcggcaccgcttctttggcatggacggccgcgtcgaactgccggttgaggccgtcatcggcaagggctctttccaaagcgtccgacccagcaaacttggcccaccctacgtcaatctcgacatggcttacacagcggaccgctgatcgaggtcgctgcccgggtgctcacactcggaagagcaccggctgctgccggggagggcctcgtggcggggagggcgaggagaccgcggcgctcggggaggccgaggtggctttggtggtggcggccacggcatcctgacgagcctcaacgctaagcagacggtgaacctcaagcggatcctcaagggcgctcggtgggtcgtctcgcaccttcagctcgacgagcaaggctcgacgctgactcgcacacccgctcagcttcaagccacgtattgctcgcccggcaaggagttccggctcgagtcgatctcgacgcagtcggctcagcagatccggttcgagggcggcaccggcgccaaggtgtcgctcgataataactctgcgacgcgctatagaaatcacctgcagttcccaggcatgccctgcgtcgtcttcaaaggcggcaaagcggtcgtcccttcagagctcgttcggatcgcggccaatcactcgatcccgccgacccggctaacggccgaccagacggcggagatgatcaaagtgacggcgctgccgccgcccaagcgcaaggccaacaccgacgcctggcgccggacgctcggctatgagcgcgcgcccaagctctaggcctggggcgtcggcgtcgacaagacgatgaatacggtcgacgcgcgtgtcttcgacccgccgaccgtcgtctaccgcggacaggagcgagtcaagcggcgggccggagcctggaacctcgtcggtagtacgtgcagccctcttgctccctttttgaacccgccggctgaccgtgttcttctactgacgcccgccctcatatccagagaagttccgccagccggctccggtcgccctgcgggcctggtcgattgtctccttcaactcgtacatgcgcgaggccgagatccagaacttcattggcgtcctcgtcaagaccctgacggcatgcggcgtcgccgtcgataacacccgcccgccaatctttgcccgctgccaggcgcgcgatgccgccggcgtccaaggcggcatgcctgaggctgcgcgcgcggccttcaacgcgggcaagatgaaccccagctcctgatcgtcatcctcccggcccaaggacgcccgcctctatgagggggttaagaggtgggcgatgatggccgggtccaagccggtagctacccagtgcctactcaagacgaagatcagcggcgagcaggccgagagcggtctgccgcagtacacttcaaacgtcagacctctctcctcttctcgcctgaggctagcctcgttgaccaatccgttctttgcactcggtcgcctactcaacaggtggcgatgaagatcatgagcaagctcggtggcgtcacgcacgtgcttgggctggccgacatgctcggctgcgacaaggagaccgtcatcttcggggcagacgtgcatttttcttgtcccacttcagcctgcaacacccgtgctctgctgaccttcggcttgcgctattcaggtcacgcactcgccggtccgtggcgatgccgacacgatcccgccttcgatcgctgccgtcgtcgcgacgaccaatggcgctaacacccagtaccgggccgaggtccggctgtaggctgactgagtcgaaatatttcaggacctgcaaacgatggcggccagccttctccgggcgtaccgcaagtcgaacggcgaccagccggccaagcgcgtaatcatctaccgcgacggcgtctccgaaggccagtttgacgacgttgtcgaaaaggaggtcgcagcactcaaggcggctttccgccagctcgacccgaagggaccgccgccaaagctcacctacgtcgtctgcggcaagcggcaccacgtccgcttctacgccaagacgccgaacgacgctaacaggaccggcaaccttcccgccggcaccgtcgtcgaccggggcgtcacctcggccgtcatgagcaacttttacctccaggcccacgccagcctcgtcggcaccgcccggccgacgcactactcgatcctcgtcgacgagaacgccttcacggccgaccggctccagcagctaacgtttaagctttgccacgcgtacgcacgcgtgactcggtctgtctcgctcgtcccgccggcctactacacgtgcgtacctgtctcccctgtgaagcttgcgcctattctgacgcccctttctcctccttctggctggcctccagggacgtcatctgcaccgctgcccgcccgatcgtctacgaccaggatatgctcgagcggtcgacccaggcctcgagtgacggcggcagccgccagggccaaccgacagcgatccaggtccggctcatccaagaccggctcggccatgtcgcccgccttcgactcggttatgtagtacatgtagcgctgttcaaccggcgactcgaccgacgcgtccctcccttgacgtcgcggcctcgactcgactcggatcgcctgccctccgcccacgacaccacccgtgctcgctcgacactccttcgttatcgtcaagacatgtttccctcgacccgcttcggtggcctctgctgcctgcttcacgcccgcccattcgccgccagagcatcgacaacggccctggcgccttggccgctccgccgggctgccgaatattcctccctgctgtactccgtccctctgcctcaccctctgcagccccagtcatgccctccttcctacttgcttccgtacgcatgccgtcgacctccacttgcccggacccgctcggccgagccgtccgctgacgagggagctcggttgcgatcgatttcagtcgggaggaataaacttggccggctgacgaaacccccttgctagccggcgactccgcctccatctcgagggcacggcgactgttctccccgactcccacaccgaccccagcaagacggctatgtacgtgcccgagccctctctccgctcctccgctccttctcgccctttcgtccgttcgctgaggaagcaggggcgagctgcgcggacagcaggctgctaaaagagacgactgacgaccgccacctcccagtttccccaacacccatcctctccctagctctcccttttttcccttaccctattatccagtcagcagatatggcacccgtcaccaacgagcgcgtaattttcgcgaaggtccccaagggcgagcctgtccctggcgagcacctcgtcgtcgacaagagcgagacgatcgacctcgacgccgagctcaaggagggcgagatcctcgtcaagacgctcgtcctctcgctcgacccttacctccggggaaagatgcgcgacgcctccaaggcgtcctatacgcccgccttcgcgcttaacgagcccatcgtcaacttcggtccgtcttccctgccccgcttcggcgaacgccgacgctccgggctgacacctctgccttgcctctgccttgcctctgccttgcctctgccctgcctctgccttgcctctgccttgcctctgccttgccctttgaaattccaggtgtcgtcgaggttctcaagtccaaccagaaggcttaccctgccggcgtcaagctctacggcatcttcgttcgtcctcgcacgtctcctacgctaccagagctagccggctgactgaatcctgcctcccacagaacttcaagcagtacgacatcgtcaaggagcccgacaccaagacgctcggcccgtcgggcgcctggcgcatcatcaagaacgaagagaacctgccctggtcggcctgggtcggcgcctgcggcatgcgtgagtcctaccgacagcccgtgacgcctctgtgcggcttgagctgaccctaccccgcctccctttcggatcgaaagccggcaagactgcctactacggcttcaaggccctctcccactcgaagcccggagagtcggtcttcgtcagctcggcctacggccccgtcggacgtcagtcgctcttcttgtcctcctgtacgccgcttgagactgacattcatccgtcctgcagagctcgtctgccagatcgccaaggcgtctggatgccatgtcattgcctccgccggcaccgacgagaaggtcgagttcatcaagtcgctcggcgtcgactcagtcttcaactacaagacgaccgacacggcaaaggccctcgccgactttggcaagccgatcgacatcttctgggacggcgtcggcggtgcgaccctcgacgcctggttcggcgccgccgcccgcggcggccgggctattgagtgcggcatgatctcggcatacaacggtggcgaagtgtacaagttccggtgtgtctacatcggaccaggcttgcagatcttcactatcgggactgaccctttccctgcttgcccttcacaattatctaggaacatcatgaacatgatcggccgcggtctcaacatgcgcggcttcctcgtctccgagttcgagtcgatggccgacgagttttacgccgaggtccccaagtcgcttgccaacggtaccttcaagtcggcggaggaggtccgcgacggcctcgcctcgacgccccaggccttctccgacatgctctcgggcctcaacaagggcaaggtcgtcgtcaaggtcgctgacgccggcaagtcccacctctaagtctggccggcggctgtctttgactgtatccattacgacctccactatgaccccccactatgacctttgctatctgagaagagtcgagaatacgacagacatgactgatcggcccatcaggacgtccactcgcccccgcgctcgcaccaggcgacgccgaaccggtcgacgccctccttctccctgctctcggcgatccccatcggcccgctgccgacggcatacgaccttcgagccgtccctcgaccgtccctgccaccagtggcgatcggacaacggaagccgaggaagacggggcagagtcggtcgacgtgatagcagaggccgaggcatggcgggagctccgagtaggcgtaagtcggttggacgtctgcgagcgcgagggagggcgaccgagggctggcgggcgaccggctgagcagcggcggccggctggtttcgtcgtccgcttcagtcgcaggttctgagcctacttcgggaccctctccgcactgaacaggcgtcgaggcattagcaactctgcgagtggtggagccagcgtcggacgaacacaccctcgggagagacacggcacagagccagtcgcgataggcccgccagcagtcctcgcagtcagcgacgaacgagtaccgatcctcggccctcccgcagggccaagttcccagcgaaagcgcataactcgcgagatagtcgttgagctggttgacgagactctctgggaggctcgtcaggaggccgccgttggctggtgtcggcagcgcgacggcgtgagcgaccgctgggcagaggtcaagcgcgtaggcaagcgggcaaggaaagtcggctgtggcgagcggcaagttacgtcagtgaaaccccttgtcgagtaaaaagtgacgagaccgacctctcttcatgcgcgcccaaatcgggccggtgaggatgccggctccttgcactgccagctggtcgttctggtcgttcggtgaggagcccggcggggttaagacgaaaagcgtgtagttctgtccagcagcaagtcctcctgctccggtagaagagttaccggtcaggacgagcgtctcccgccagccactgccgagcggtgcgagctcgacccgccggtcagcgacgacgaccaccggcgagaaagcgagcgcggtccgccgaacccagcaagtcgagcgccgcatacgccgaacaacgtcttcgtcgagcgagtccgtcggaaggacgtagacggttgcgttggggctcgttggtcggggtgggtcgaatggcggtggcggaagggtgtagttgggatacgtctgtcggacagggaaggaggacgacaggttggcgaatggcggcgtccggacaaggatgtgcgtcgccgtcgtatctccgagcagaggaaggtcgcccgagaaggactggacgagacctggagagcgagagcgatctcgaatgtcggtcagcgcagcagccgcaagcggcacggcaaagacgcgctacgaaccgcttgcggacaagccgacctcgacgtcgccgttttctccctgatcgccactcgagagtgcgacccaaaagccgtcctgggcaccgccacctaggctgccctgccagctggcagagccgtcgacgaggtcgacgaaccagacgcccttgtctgggtcgcttgcccagcggggtcggccgtccgcgtcgtcatccgccggctcgagatctgccgaggacggggcttgatatgctgacgaagtcgagacgaagatctggacgccttcagctgaggggtcgcagagcgcgaaggagagggagagcgtcatttgcggcgtaagggaggctgtgacgtcggctgcaagcgaaaggatgcggccgggactggggccgcctaagcttgaggccatgacgacgtcgtacgaagcgaggtgcggcagtgaggcgatctcctgcgcctggacatgtaggggcaggaacacacaggcggtgaggccaagcaggagcagaagctggttgaccgtcgtccctcttcgagctgccgtcggcgggctgctgcggggcggcgagccgttggtcgcaactcgaccgtcagccgtccgaccgtcgaagttcgaagcgccacgacatcctggtcgttcgggcgttgacggcgaggacaggatcattggttcgacatcgaagtcggatgggatgaaggccgtcaagtcgctctccggctcggtgctgcggcggaaagggggagcctttcggatttctcgccggccgcgccgcttgctcaagcacgtccagcctgccgggctcgacctcgacctcaatctgccacctcgtccctctttcagcagcgatgtctgccgcgctcgccagcgctcctggtgccgctctgcccaaagaggttgcactcgtctgccttctcgccgagtcgccccttgtccgccggcgctgggcagatctctttggccgaggcggcttgctcggccgcgtcgtcgaccgcatcgccgcccaggccaacgcgtctagctcaggaggcagcaacgtccgtcctggcatgcggctctctgcctgtcgttcctcggtgctgactctggctgcgtttcgttcctctgtcgggtgcgctgcaggtccggctcgccttcgtcttgaccgacccggcgcaggcgaccgacccgagccggtcacccgtcgcgcagacggccttcttcctcccacccggccagtctttcgctatgctctcaactgcgggcgccggtggaccgagcctgagtagctcacctctcggtcgactctgcgctggcgaggaggacgccaacaactttgggctcgtcggcgccggcagctgggagcggagcgacgtcgccggcgatggcgatggcgatggaccagaggcacaagccctgctagaaggtctggtcgccgcgctcgaggtacgccatcgttctgcactatctgcttggaacggaagcctccgaaacctgaccaactcgcccttgcctgccctcagctcttcacgcaccatcagtcgcgacccttcccggcgtcgggcgcgtccctgaccgacctgccgatgccaaccttcacgccgatccccaacacgacgccgctcaaccttccaccgttaccttcctcggccgcgacgtcgccctacccaggccgagggtcagccgccccacccgcaaaggcacgcggggcggtcgagcgtcatctgctcttgatctcggacggcggcctgcgcctgcctccggagggcgacgaggtgcgctggaacggcgaatcgcggttcgatgggacgacatgggcgactgccggtcgtgaggtcggcgggctcgatatcaggacgagcgtcatcttgctcggcgactcggttggcggacctgtggataagactcaagcgcagtcggttgacccgaaattgctggctttggtgacgcccgtgagttcctccagcgctcgctccttgtcgcatccagcttctccattgaccgtgtaatgtccgcactcgctcgctctgcagagcggcaagcccgccggctcggcctggttcccgaccaacgaagccgacaggatgatctttcctccttcgctggcaccctctctgccgccgcctgcgctcaagcgagcactcacatcgccggccaagcgcgaagaggctgctgccaagcgtcagcggctgtcacctgccccgctcaacgcgagtcttggcgcagacggtagcggcacgctctcgctgacggtgcctgccggtcaagctccaagtgctgcgccggggtcgacgacgccaggtatccctccgccagtcaagcgcgaaccacagcaaccgccgccggttcctgcccaggtcaccgtcaccgctccacgtggtgcaccagcgccggcgaacgtgacgcggccgaacgggactgccggcagtcaaccgcagatgcgccttccacccgccatccggccaccgccagcgcctacgacggctgtcggcgcatcggctgcgaacggtattggtctgccccctccgtcgcccgtcaagacgacggcgatgcagcgctcgccgcttcaggcttcggtcgcgcgactcggcgagcaggcaggcagccagtcgcagcttccgagcaaggagcagaagcaggcgtccaccgagctgctggcgaggctccaagctcgacagggtcagcttgcgggcggagcgcctactggcggtcagcaaaacctgacacctcagcaacagcagcagcagcagcttggcaaggcgctcccggctcagcagcctcagacgcaacaacagcctccgcagcagcagcagcagcagcagcagcggcctggcatgcccgcaccccagccggcctacgcgcccgggcagcaagcgccgcagccgcaacggccgccgatgcaacagccctcggccaagccgttcgtctggcagggcgaggtctcttggacggtccactcagccggccccaagggtggcggcaacgtcctcggctgtcaggtcgtcggatacgctgcccattcggtcgcgctcgaagaattgcgcgtcctcctcctctgtacgacagagtatcagagctgacgctgacttgaccgcgccacctgcagccaagccaagacgtggccaaatcggctgcatctgtcggccgtctctccccttcagctgaacgagatcaagcgctacgttaccctgggccgcatgccctgcatcaccctgacgacgtaccacaagcctgggacgtctgacgccgaccgccaaaggggcgagcagagctacaattcgctcgcgcgcaatctcgatagcaagaagacgatgggccacatccgcttcggtcagccgggctgcggcatggtcatctttgccatgggagccggaggcggccagccggtcaagctcatggccatgtgcttcctcaagcaaccggtccggcccgaccgtgacctcattcccgcacgtcaatgactgaccttcgcgtctctcgcccttccagatcccctttgcgacgtcctcagtcgctccgcccccggcggtgccgggccagccgcaacaggtcccccagaagccgctcaacgcaccgatgccgcaacagcagcaacagcagcagcaattcaatcagacgccggccaacctgctaacccttcagcagcagcagcagcagcatcttcagcaacaacagcagcagcaggggcagggtgtcaagccgcagccgacgccgtcgcagctcgccgccctccagcaactgcggtccaacgctcagcttcagcagcagcaggcaaggcagcagcaacagcagcttgctcagcaacagcagcttgctcagcaacagcagcagcagcagctccaacagcagcaactccagcagcagcagcagcagggttatccgcagcataactacggccagcaacctgtccagcagcagcagcagcagcagcagcaagggggtggtctcggcgtcaacatgacgcaagagcagattgcggcgatcttggcagcccaccagcagagccagcagagtggccagggctggtagcgggatggcttgacgcttaattgcttatgaaagactcgttcatgggagccagagggtggtgagtaagactggcagccgaccatcaactgcctctgagccagcaggtcctttgccaggtcgtgttccatctgtcagcgccagactataacggaacatctcgagaacagcagcatccttcgtcctcatccacgccagatgcctgctgtcagacgtgaaagctagactgacggcgggtgcgccgatcgagatgagctcggcggttgatcgggctgctgcgggccgccttcggtcggccggcctgtctatcgtgggtcgttgacctcgtcgtcgaaggatctcaacaacgacccaacgtttcttgaccatgctcgccagcctcgccaaagccagcccatcagcagcctcttccccggctcggcaggttgccaagtacctgctcgtcgccccggactacactgacgagggcgcgctccagcgccggctcgacgtccgggcccgccatctcgaggcagcgacgaccagcttcaaggatggtctaattggtccgtcgctggccctgctccatgccagcaggcgtctcctccctgctgaccgggatcccttgccctctatcggacagcctctgggggtccgctcctctctgcagacgagctgccggccgatcctgcgcagccgctccccttcgccggctcgatgctcgtgatcaccgccccgacgctagcagccgctcgggagctcgtcgagagcgacgtctactttacgtcccgcgtctgggatcgcgagaagctccagatctggccctttgcagaggtcaactttccgcagatcgtcgcgtcggcagcggaggcgtccggcaggtgaatcggcggcccggcacagcgcctgatcggccaaacgtctgtctgacgaccttgtcgattgttgcagtaacaaggaataggcttagaatcttgacctctttccgcatcttcgctggtcaaaccgccttctgttgggccctgccactagcagtcctcacctcgttgatcaatcttccgctcgtgcgctattctagcgcgtccctccctacccaggccgtcgtcgaaggcatgggaccctcgtcgtcaagcgccggtagagctagagcggcgggaggaggagatcgatcgcctccgagcgcagctgacgacgctcccggcagcgcaatagatgctgttggggtagcctctgggcgggcagcaggcggccctccttcttctcaccaagggattcatctcatcttcggcccgcccgaaagtacctcgtacatctcccccccgccgccgagcgcactctcctcgcgcgcgagatgcctcgcccagaagcccatgatgagccgccactcgtcggccgagcggggcatgccctcgccggtcctgaagcgcacctcgtcgacgtctgcgaagcctttgcggaggcttgcgaggtcggcggacgaaagggctgaggagggcgccaagggccggtggaccgcgagcaggggggtgccgttaggctgcggggcggtcgttgggtgggagaggagcgggcctgcgacgctgacgatgctccccagtcgccgacccgcatgcgcgcggccgtacgacagcgtaaactcggcggcgacgcttccgccctggccaaagccgaagaggtggatcgcctctgccggccatccgcactcgtccgtgaggtgcgcgagcagcgcgcggaggtcggcgaggatccgcgaggggttcggagaaggctcgggcatgaagtcgggtagggtgaaggacgggtagaacatgaaggccggctcgtcgagcaacgggatctgcagcggggcctcgagcgagaggacggctgtcgagggcaggttgagcttcttgccgaggtcgaagaagggccggctcgtgtcgcctgcgaattagcgggggccgcaagagcgtcaggcgtagttttccaagacatgccgaacgtcgacagcgcacccaggccgtgcaggaggatcagaaggttccggtcctgagcggccggccgggacggcgcgaactggaagttgagcgtggtcgcgtccttgcgcggtggctttgttggcggcggccgggcggctgccgaggcgcccgagacgggagcgacggcgattgtggtggacatggtcgaagagcgggcggcggtgcgaggctgaagagggcgtgggtgagagaccgggagaaggggaggttaaggtcgggcgaggaggagggagagctgcgcgcgagccgaggtgaggtggcgaggtcgggtcctggagaaggacgacgatcgttactggccagcaattctgctgccaaagctcaggatggcgccagttaccgagtcgggaactcgctacgaggacgatgggagtcgagagggagcggcgaagggcggaagagcggctgcgacgacgacgacgatgccttccctccgccctcgaccgccaatgagcaccagcagcaccgacaagcacaacccgctcccgctcaaaggcgaggtcagcgcctttgtcggcgtcgccgtcctccccgtccgggggcacggcagcgacggcgaagacgacgacgacgacgacgacattgcgccggtgagcccggtccagggccggcggacgagctgggggagggggctcatgaagtcggctaggagcagtatcgaggtacgttcggctttcttggctggctgctgcggctgctgttgttgtcgccgccgggctgccttgccaagccatgcgaggctgggctaacctcctcacctgctcactcacccctcccccccccctcggaccccactgcgcggcacaatggtcgctcgcagcaaccccggacgtacgacgacacgacccctcctccggcgctcaccagcgcgaccaggtcgtactacacctcgcaatggcggaccaacacccccatcaacctaatccacatcgtcgacctcaacgccccgccgccttctgccgagacgctcgcggccaagtcgacggccggcgaggaggtcgactcgactggccagcgagcgaatgtgttccttgcgagtcggcaggaaagggtgcgcgcggttctggggatcgtggggaaggacgagctggccgaggacgaacggcgcgagcgggtaaggatcgtctgcaagagcgaccagtggacagcggcggccgagattgtgagtgctgcctgttgcgcagcccccccccccccatcacgagaccttcctccttataggcgctgaccagccccgcctccaacccgctggcgtgctccaggcccagcgctatccgcccgatcagcccttttcgctcactgtccgctcaatccatcagcaagcctttgtcgtcctcccgcgctccttccgcgggcccgtccacttctccaccacctccggaagcgtcatcctctcgcccgacgtcggcgcggcctacacgcacctcagcaaacactttggctttctcgggtcgatcgagggctggtcgcgggacccggccaaggtcgacgacgagggcctggacgagtgctgggcaacctcggacgttgcgcgcgtgcatgtccggttcgaagatgaggagcccgagctcgacccgctcgaggaggctgcgaagaaggcgggcgagacggcgaagaaggtgtcgtcgtggttcaggaatgcgttcgacaagatctagcatgcggcttgacgtcacgctcgaaggggtggggtgcgggggcacgactgatgccccctcttagtgttgctgatggtctggaagggcgcatcgtcaggcagcaacgacggccaagagcaagggagttgttgatctagtgagggctctaaagaggtagggctacaacaggaggggggcaggtggggccgccggcagcatgcaggccgcgacgatgcaggtgggggttctctaggcgatacaaagggtgggtcgggcaattccggaaggcgccgagccgctcgctcagtgagccgagaagtcggccggcgtgaacgacgtcgaacgctcgagccgtgattcggccgtcgccgcccggacggcctcctcgaggtcgaagtggaagtagggcgtcgtaagcgagacgagcggggccaggagcgtgcttgcgtcggaggcggcctcgctcgggctcgagctaagctcgcgcgccggcttgaacgacgatggctcgtggtggtgatacggcgccttgccgtcgtcgctcgaggccgagccgtcgggcgcgtggcggacgacacggatgtcgtcgggtgcctcgcgctcgcgctctgtccggcgcgtcgcgctccgctggaggctctcgtccgcggcctgctgctgctgctggaccgactggaggtttgcctgcgtgtgaggcgtgaccgtcgcaacctcgcacggccgggcgcaggccttgtcacccgtgccgaagccgccggcgacgagcgcccgttggacccagggcgagataatgcccgaaaagtgaaacgagacgggcccgtcggaccagcgctcaatttccttgcgggtatcgacgaggttctggacgccggtctgaatagggcaggcggaaggggttgagtgtcaagcaaattgatcgagtgcgatgatcgcaggccgactcacggtatcgaggttagcgacagccgcgaaatcgaggacgaccgcgcggagcagcggcttgctgtcgttctcctcctggatagtgtcgggcgccttcttgccccagcggctcgcgccaggatcgttccagggccggtcgccgcgcttcgtcgcaacggccggcttgccgcgctttgtgtgcaccttgacgtggtcgacgagggcagaattgtggtaagagctggagggctgagtgtcagcagatgctgctcatcgagtaggatccaggaaagcccgcgactcacgcattggggaaaaccatcgactcctcaaagcggtagatgacaatcccctcgggcggcggctcgacatggacgccgctcttgtgtccgtaagggagaaagacgtcgcggacgatccgaccggccttgccgtcctcgagcgactcgacgccgaccttgacgcggccgaggaaggcgccgccgggccgggcgatccggaagaggaggacgacgagcgaggcaccaatcgagacgtagatgccgttctcgatcgtcgaaaagacgctgacaatgacggccgcgaagaagatgatggcctcgagcgctgccagtcggaaggtagaggagtcaggcggagggactgatgaccgggctgcagggcgacgtacgagagatgcgccagaaggcaaatgtgccacggggcgacacgacgaggtcggcgacagcgtggatgatgacggctgagaggatcgcgctgcaagagggaaggcacggtgttagacgacgcgacaaacgtcaaacggcccttggcggaggacgcacttcgggatgaagtagaaggcgtcggtcaaggcgtagagggcgatgatgacgcagacgccggtccaccagccggcggcgggcgtgcgaacgccagacttgctcttcagcgccgagcgcgaaaaagagccggtcgctgggtaggccgagaaaacgacgccgacgaggttggtgacgccgatcgcgatctgcatcgtagccctcagcgtcagcactaaaagatcctctcgaaccggtctgcagagcgcaaaaggctcacaagctcctggttggggttgatgctgtacgaattgatgcggccaaacgacttggcgattgagatgtgctcgagcaggaggatgatggtcgcgacaggaatcttgcttgcgaaggcgccgagcagctccgggtcgaccttgagaaggccaacgttgcggaagccggcgggcacgtccttgaggatcgagatcgagtagggctgcgtctggtggacggtgacccgccaggcgatgatcgtgaaaatgatgatgacgagcgcgttgcgaaggacgccggtaaagaaggcgacccggcgccagcgagggtagcgcgtctcgacgccccggcaggcccacttgacggcgtagactggggagcagaaagcagcattcgtcagcctcatcctctcactttctcgaaggggcctcggcaaggacgcacggaagacgagcgccgggatgccgaacgcagcgttcaggtcggcaaacttgagatgccgcagcgtctcgatgatgaccttgtaggtcgcgcccttggtgttgaagccagtcaatccaagcagcgcaggcacctggccggcggcaatcgagatggctgagcccgtcatgaagcccgcgacggccggtgccgggatgaactcaacgagccagccgagccggaggaggccgatcgcaaggacgatgatgccgcagatgaatgcgagatgggtcgcaatgacctcgggcgcccagcggtcgccgtgctcagtaatgacgtccgagataatgcgacccgtctggagcgacatgacggcgacggggccgatcgagacgtcctttgacgtcgcaaagaaggcgtagatcatctgcgaggccaaggagagggggagcggtgtcagctgaggcgacggacaatgtcaagggagaaaagatgacgcacgacgccgatgaaactcgagtagaggccgtactggggctcgaggttggcgagcttggcgtacgacatcgactggggcacgaggacgagaccgacggtgatgcccgagatgaggtcgccgacaaaccacgtcaggttgtagttgggcagccaggtgatgatggggaacagctgagggtccaaggggcaagagtcagtccgtgcgcggcgcaaagtgagggcgaccgaaggggatcactcaccgatatcaagtactccttgagctgcgaggggagcggagatattgtggacgtcagctcaacacgacgagtgtctcctgagcgaccaaacgagatcgcacctgctgccagggattggccgtgagctcgcgcaagtagtcggagctgccgatcgtgcccggcgcagcctcgtcgtagccaacgatccacttgagcgcccggccgacccgcgctttcggtcccctacgcggcttgacctcgtcgcccgcctcggattcgggcgcagacgatgctggcgtcgggtgggcagtcgccgacgagagggacgaggtcgacgacgacgaccggtcggcggcggcggcggtgacggaattgaagacggagccgccgcgcgcaggcgacgccgagggctcggtaaggatggtcgggcgagggtcggacgccattgctggcaagctaaacttgaaggggtatcaaacgcaaggacgtcggctactgcagagacacgacgaggagaaagagagagagaaacgaggtggtggccggcaagcagtgctctctgggctgacggcttgatcatccgggcttgcaagtcgagggctcggccgcccgaaatcgaagcgcgcggacttaggtaagtcgaaggcgtgctcgacctccactttgggcgctgcgcggctgaccggccccactctcgactgcccgtcagcaagtgagcgcaaccttcgctgggccaggcatgtcctcctcgtcatgttgaggcagggtgcagcaaggaaaaagtttgcacgcgggatgagccgcctgttgtcactccccggctgcacacacccctgccgcatcgcgttgcgctcgagggtgctgtgtccgagcacatggtcttcttggtctccctggtctcatcgtcaaggaatacctttcacccctcagaccttgtcgctcaacagaggaaaggagagcgcgctgcatgtgtcggagcggtcggccgtacgaacgaaaccctgtgaaatgcatcgcgatgcaactgggcggacgaccgggagacgcgccgaggaggctgcgagcgcgtcccctcccgaccgacaactgcctgccgctcctcctccttcttacctgccttcgcctccgcctcttctccaactcgccaattcgaaccgttcctcgttccgccactccccagtctcttgttccgcaacctagccagccatgggacgcgcaccgccccctcccgagacggccgacagccaggagtcggccgtcctcaacggtatcgaccagtacgagctccagcggtcgatcatcacgcggctcgtcaagagctcggtacgtcttggtccagtgccgtaaaacgaagtcattgttgaacttgtctatcccccgcccgccagctgccggccgaggtcaagctccagaaggaggtcgccggcgcgctcagcaagtgctcgaccgtcttcatcagctacctcggttcgtcctcctcgccacctgccggtcccttctgatagactgacctgcgcctcctccttgtgtagccgctggtgcgcatgacaacgctgtcgcgcgcgcggtcaagacgatctcggcccaggacgtcatcggctcgctcgcaggggccgacctgtggccggaagagctggccgagctgctggaggaccagctggaaggtgcgtcgggccaggcgcctgccgtcgacgaggctcagaccgctgagagctgaccttccaatctgttcctccgcagcctaccggacgtacggccctcggcgaccagagccgcggtcaaagaaggcggccaaggcggcgccgacatcagctggctcgtcaaaacccctcaagatcaagctgtcgacggcgggcaagggcaaggcgcgtgccgagggcgatgcggccgactcggcggacggagctgagggtgctgagcggaccgagggcgtcaggagcgaggaggacgacgaggaggaggatgaggacgacgacgacgacgaggatgaggacgacgacgacgaagacgaggacgaagaggacggcgatgggggagcagagaggatgcacgtcgactagcgctgtcggcgtgcttctctctatgcctttcctccgctcgcagcgcatctttgcctcggtctcacagcgctcactgacgaccgctgactgccgctgctgaggacatccatccgcacgcctcgccgtcaaaccccttgctgtcgcagcctccttccgttgacctcgctccggcgtcgcgcaaccttcatccgctcggctgctgatagcgaccggcgtgctgccccggacgccgaccgggtccgctcgatcgccgcgagcgagagcgacaaccggcggcgagcgttcgaggctgatgcagagcggccggcgagccggatgccagacgacgagcggcggagaggtccgcttgggccgagcgagtggcggactgcagagccgagcgccggttgaactgcgttagacgacgccgaccacatgacaggcgtagtctcggggagcgctggagggccgaggctcgggaagtcgacgccagcactcgggctcgtcggcgaatcgaagtcggcgagagacggtggaggcgagatggcactcgtcccaggactgaccatgtggaggagaggggtgtatgcgccctcggacggcgcgaggtcggctgttgagactgagctcccatgcagagccggcgctgtcgagtcatcgtcgtctgcgagtgcgtctgagcggtgatcgggctgaccgaagacgcggcggaagagagcgtcgacgaggccgtactcatccgacgcggcgtcgccgctcgactcgacctccagcgagggctgagacctctcgaccgggatgtcttcgatgtcgcggccctcgacccagatctcgccggtcgaccagtagtagtcgaggcccctcttgtggcgatggacggcggtcgcccgctcccactcggcctgcgcttcgagacgcgctgcgagctggagcgcttcctccttcacctgcctttccctctcgaacgcggccgcccgagcttcggtctcccgctcacgttcggtctcggccttaattctctcagcctcggccgcaagcgccgcttgtcgggcagactcggtgcgccgccgaccaacaagatggttgttgagcttctgcgcgctaatgttgaggtagcgcgcgagcgaggccttgagcgcggccggtgggtggagcccgtgctgagcgataaaggcgtcggtaatgagacggacggcgggagggagtggcttgccgtgggctgccggctggaaaggcgacgggtcgcggaggttgatcagctgtcccgagggtgagggcaggacgagtgggtcgtccgcggccgtcgccgctgcggccagcgtcgcgctcggcaagggagcgggagcctgaaaacgaaggtggagggttggccaatcaagtacagtcgacagcgggatagagcccacctgcatcgaggccgtctcgagagtcgacatctgcgggtgagggtggtggtcggtcgctcgagacggcgccgacgcgcgtcagccgtctcgcgcatgctgggcattcgagactgtctgtgtacaacgaacgtctgtgtacaactcgaagccgcgccatgccaattgaaccggcttgccttgttcttgtggcttgtcgtcctatccagtcgatcgcgctgactcgctctgcgctgcccgtcttttccggtagtcacccgttgagtcgacggaagcatctcacgcggcggccaaggaagccgaagcggagctgacggtggtccggcctgcaagccagcaggtatcagatcttttcgccttggtatgcgcctgtcacattcgagggacgtcgatgaggaggattgggtcattgtcagtacgagacgagagttagcaggtctgctcattcgcagcgcagctcttgcagcgattagctcagtccgtctccaggtcgcgtccttcctggctcagctactgcgtgagcgtcagtcaaacgaggtccggggcgtcgttgaggagagcagcagaaggtggctcgcgcgtcggtcgctcgggcgaaggtcgggcggtcgtcgtgctggctgctggccgcgcggccctccacttttggaggcaaggagaaaaaagaaagggggtccgcagtggccgccgccgcgctggccgccgccgaagcaggagccgcaccatcgtctcatgtcgacgaccggccgtcgactcctcccgccgaccccagacctccagacctagctgctctttgacgccatctaccagcagatctcccgcttctcggcgcccttgcctcacctccatcttcaaacgacctctcctactcggaccgagccgtcatgtcggactcggaagacggccgggacgacggcaagagagcaaagggcgggcccgtagcaggaggtgggccgacgccgagggcgagcttgcgggcctgcgattcgtgccgggcaaagaaggtacgtctcttcttctatcgagcacaaagccggcgggcatggcccgagcctctggcctggctggctcgctgacgggcttcgggcgcggagcccgtcaaggccgcccgcaacctcgggctacgacggaggatctggtcccggctgacacgtccttagcaactctgtagatcaagtgtgatggcccttcgatggacaaccggatctgcaccaattgccggcagtacggcttggactgccagtatgtccagcaggccaaggtccgtccctccgtcggctcacttcccgcggcactcgtcggctccgctctgactcacctactgacaatctcgtccggctctgtcatgcctcggtgtctgggaacgtcgcctccctctagaaacgcggcccggtgcgtctctctctgaccacacttgccggccgctgtcgccgcttcgaagttgagccaagactgacccccccccctgcgctctctcgcttcgcagccgaagggctacatcgagagtgtcgagaccaggctcgcacggatagagaacctgttgaaccgagtacgtaccgctggcgacagtcgccccgagctgcgaaactcgttgcctgccgctctggctgaccagaccgccgatgccttacctcccttccgcagctcgcgcccggagccgactttacgcccgagctcggcgctcgtatcgacaaggagaactttgaccttgcgacgcatcgccagtctgagccaaccggcaacgctcacgtcacctcgcccgtcagcgccggcggcggcggaccgggtccaagcagtcggacgagcagtctgaatgcggccgaccagccgagccaggcctgctcgtcgaccgaggccatccggccgtggctcgaggatgggaacgagcgcgccgcgggcgacagtgcagaggaggatcaggaggaggcggctttgctgcaggcgatggagaaggtccagctcgcgcacccggacgaagagcaggtgccgttgggcttcagtggcaaggtgcgcttgccttgtccgagctacgcactcgccgcatcattcggagacggctctgttgacattttcttgcccttgaatcagtcgtcgagcttcaaccttctgctttcggcccgggactataagtacggcaccgtcggcgcgcccgacaacttcattgagggcctcttctcgagccgtcgacgtacgtcccaagctgctgcgccgcacgtcagtcccgcgctgaccgcctgcactcttccgcgaccgtgcagccttcttctggaagatgccgccatgggaaaacagccggctgatctcggagcacccaatgacttggccgcccgaggacctcgtcccgcagctcgtcgacgagtactttcacctgtaccaccacgcctgcccgctgctacacgagccgacgttccggcgcgacctggccggccgggtctacgagcgcgacaaggacttccggcacctctgcctgaccgtctttgcgctcagcagccggtcgtgcagcgacgagcgcatgtacatgccgcgtaacattctgcccgccgatacgcccgagccctaccggcgatactcggccggctggcaactcatcggccagattatgtcagaaccgttcgactggaacgcgccgccaaatctctacgagctgcagagcatggtggtgcgtctggaggccgtcgcgaagtgagcctcagcaacccagcctgaccaccaactccctgaacccgcacagctcttgacctcattccttcagggcggcagccatccgcgcatcggctggaccctcatcggcgtcgcactccgcaactgcattgtgcgtttaggtcgagcgcaagagaatgtccttgtgctcgctctgttggctgacctcctcatcacctctctccgcacaggacctcggcctgcatcgcgagcacgtcctcaagagcaaacccaaggctgaggctgagctgtggcgccggacgttctggtaggctttgtcgtccacctcctcgctaagaggtatccatccagaggctgacttgcctctctattctaggtccctttacgccctcgatcggacgacggcgggcatcatgggccggccgctggcgatccacgacgaggacatcgacattgactacccgctcgacgtcgacgacgagtactgggagacgggcaccccggcccgcgactttgtccagccggagggcacgccgtccaagatgtcgggcttcattgcctcgctcaagctcatgcaaatcaacggctactgcctccgaaccgtctactgcatcaacaagtgcgtcctgcggcgtctctggccccctctccgacgagtcctgcagctgacgcccactctttgcttgcggcttcaagggccaagctgatgctccgcttcaattcgattgaggcccagcagcaggtcgtggccgagctcgactctgccctcaactcgtggctcgacaacatcccagcccagtgcggccttgcgacgttactgatcttcttcccgaagccggcctgacccatcctccctcgtttcggacccccctcgcagcctcaagtggaacccgcacaacaaggacgagatctttatgcagcagagcgcgctgctctactcggcctactatgctacccaggtgcgtcgacaagtgaacttcttgccgactaacccttgctgaccctaggtcccccctccttcagatcctcgtccaccggccattcatcccgacgtcgtcgcgcccgtcaaaggtggccttcccgtcgctcgcaatttgcaccaacgccgcccggtccggcgcgcacgtcgtcgagacggctcggcaccggccgcgcttccaaggctacgaaatttcgaccgccctccaagcatggacgtttggcatagtcctcctgatcaacatctggggcggcaagaagagcggaagcatcggcgacccagcgatggcccgggccgacgtcgacaagctcaacgccttctttataaagctggagcaacgctggttcgttggcggccgggttggcgacgtcctccgtgagctcgccagccagggcggcatgccctcgccagacccggccaacgtcgtgccgccgtcgcacaagcggcctcggggctcaaccgctccttcctcggcatctgcctctgccgcggcgcccccgccagcccaaagctttggtctctccgcagcgccagcgccgccgaccagtggcacgacccggcagcgcaagccggccggcagcatcagcaaacgcgcctcggccgacttctcccatgcgcaggccctcttccaccaagcaggccagcactcgccgattactcacgcctcgcccgcggcgtcggtccaggagtcgaccgcgtcgtcgtcgggcttccctgatccggccatcgacgcggacatcgtttcgcacaggcacctcccgacgttgcctcgttcagcaggcgacggcagtctcggcttctttggccaggcgatcgtcgagtcaaacggccagcagcagcagcagcagcagcagcaacagcccggctcggcagcggcggtcatcgacccggcccactttgcagccttcctcgcagcgcaggctgcagtcgccggggggcctgcagctgtcccccccgccttcagctccggcttcccaccaggtggcgccaatttgggcttcccgccggcgggcgcctcgggcccctcaccgcagaccgcgagtggcttccccgactggatgaacaccgcctcagccggcgcatcctggcctcagccgccgcctccgacctcggccgcctcgaccgcagcgaacggcgaggcgacgatggaccttctctttgcgaacggcacctttccgatgttctcgcccccgggcgaccacggcgtctctctctttggtaacggcgcgctcggcacgcccggtctcaacggcgcacccaacgaccagttccccaacacaacgacgggaccggcctcgatcggtctctgggacaatgcgccggctaactttgagtgcgtcgtgccctcggctgcttggtcgagcgtgctcaagagctgacccccgcctcctgccttcccttcaggatggacgactggagctcatatctctcacagttcggtccctctgacgccaacggccggtgatcctcgttcctctcgccaattcatctcggcgtccttggcctccctcacgcctcagtcttgtcgcccgggcgcccgtcctgccctccttcctcttacttagacgcgtcgcaatctcatcctgcttgcttgtgctgcataatgggctgtggacggcatatgtgggggcgttcgagggcgacaagcgaaagctaggccttacaaccttgcggacccgcacgacattcgccaaccgagccccggcctgccgaagctcctgccctacatgactagtgactgctggcagactactctttctccgtcttcagatcgactcgctcgcgtcaagttaggaaagtagtggttgagacgacgacggtccacggctcaactgccgggcgatgcacccgagagggccgatgctcacagacaggctcgccgcgcttcttctcggtgagcccggcccatcgagctcgtcgacgacctgctcctcccaccctccttcctttcttacaggcccgcccattcgatcgcctggtcgacccatctctcctcgcgcctcgtccttcaggccgaccgcttttttctctctacagaagcggcctaagctcgtcttcgtcctcggccgacctccgacctcctcgaactcctccgcgtcggcgaccaaccaccacccttcgctcactctccgccacgtcccctggccgaggatccgatacccttaccttctctagtcgctcgaggcttcacgccttcgtaaccgtttgcccaacatgagcaagcccgggcaggacctgtcgcagtacaactatggcaacatgagccacctcgtcctccagacgggtcagccgcctcgccctttgctgagcctcctctgacctggcaccagcccgctgacatctcgactcgtctcgccctcctttcattctgccagaccggtcaaaggtcacgcggagagaccacgagcctaccggcgaggccgagtcactcgccggccgaatcagcacaaaggagatgggcacgcgcatccaccgttcgtcctctcgcacttgacgagccttcaagcctcgcagcagctgaccctcgatgacttccttaaattaggcgacgcacccgcgaccacgaagaagaaggccaagtcgaatcagacggcggccgacctggatgagcgggcgatccggcggggcgcgacgacctctgcggccgcctcgtctggcgcctacgccgacattctcgaggcctcgcaagacctcgagggcgtttcgtaccggccccgaacgtctgagacccgtgaggtctttgagctcgtgctcggccaggtccaccggctactcggcgaccaggcggccgacgttgtccgctcggcaaccgacaccgtcatcgagattctcaaggcggaggaccttagggagttcgacaagaagaccgaggtcgaggacattatcggccgtgtctcggccgacgtgtttggcacgctcctgaacctctcaaagaagctgaccgactacggcgacggcgcggacgcggccgacggcgtgacgaagcgtgacgactttggcgaggagggcgtcgccgtcgagtttgagggcgaggacgacgacgaggatgaggatgggctcgaaggcgaggtcaaggacgagtcggcgtccgaggacgaggaagaggatgaggacgaggctggcgatgccgagatgcagcccgtcggcgaggacgaggacgacgctaacatcacgctcggcgacgccgcaccgcgcaagaaggcgaaagcggcctcgaccaaggctgcgtccgacgagattgccgtccacgacatcgacgccttcttcctccagcggctcgtcgccaagtcgtacccggacccggtcgagacaactcggctcaccaatgccgcgcttgagacgctctcttctgacttcaacctccgcgacgtcgagaacggcttgatggagctcttcgactacagcaactttgacctcgtccgcgtgctcacaaagaaccgcgacaagattgtctggtgcacgaagctcgcccgggcgggcgacgacgagcgggccgacctcgaggtcgcgatgcgcgagcggggggtcgcctggatccttcgcgagctcagtggcggtcggtcgggcgccggcaaggaggccgacgcgatggaggtcgacacggatgacgtcgtcaagcaggcggccaagcccaaggcgacgatggcccccggcgcgcttggcctccagccgcggaagacggtcgacatcaactcgatgatcttcagcgagggcgcccacctcaactcgaaccgcaagccgatcacgctgcccaagggctcgaaaaagacgagccacaagggctacgaccagattctcgtccaggcgcccaagaaggttgagattggcgacaaggaccccgtcaacattgccgacctaccagagtggacgcggccggcgttcggaaccgagtcgtccaagctcaacccgatccagtcgaaagcgtacccgatcgcgtttggcaccgacgagccgatcctgctttgcgcgccgaccggcgccggaaaggtgcagcccccttatgcgctcgcctgcctgtcgcgattgcttcgctgaccttctcttttcctcttgcacagaccaacgtcgccgtcctgacgatccttcgtgcgatcgagggctttcgcaacccctcgaccggcgtcatcgacctcgacaacttcaaggtcatctacgtctcgccgatgaaggcgctcgtccaagagcaggtccggacgtttacgaagcggctcgcgtacctcggcatcaaggttggcgagctcacgggcgactcgcagctaacgaaggcccagattgccgagacgcaggtgattgtgacgacgcccgagaagtacgacgtcgttacgcgcaagtcgaccgagacgtcgtacacaaacctcgtccggctcatcatcgtcgacgagatccacctgctccacgacgagcgtggccctgtcctcgagtcgatcatctcgcggacgattcgccgggccgagcagacgggcgatgacgtccggctcgttggtctctcggcgacgctgcccaactaccgcgacgtcgcgactttcctccgggtcgaccagaccaagggcctcttctactttgacggctcgtaccggccgtgcccgctccagcaggaatttatcggcatcaccgagaagaagccgttcaagcggttccagatcatgaacgaggtctgctacgacaaggtgctctcgtacgccgggcgcgagcagacgctcgtctttgtccactcgcgcaaagagacggccaagacggccaagtttatccgcgacatggccgtcgaccgcgagacgatcacccagtttgtcaagcccgagggcgccgtccgcgagatcctgctccaggccgcccaagacacgtccgacgccaaccttaaggacctcctgccgttcggcttcggcgtccaccacgccggcatgagcgccgtcgaccgggccgatgtcgaggagcttttcgccaacggtcaccttcaggtgctcgtctgcacggcgacgctcgcctggggcgtcaacctcccggcccacacggccatcatcaagggcacccaggtctactcgcccgacaaaggccgctggatcgaactctcgccccaggacgttctccagatgctcggccgtgctggacgcccgcgcttcgacacgtatggcgagggcatcatcatcaccaacgcctcggagttgccgtactatgcgtcgctcatgaaccagcagctgccgatcgagtcgcagtttgtctcgcgcctcgtcgacaacctcaacgccgagattgtccttggcaacgtccgcaacagagacgaggccgtccagtggctcggctacacctacctgttggtcgcccactctgtctctcgcgttgctcgtgctcattcgttgaccgccgatgccgtctctctgcgccgcagctacgtccgaatgctcaaggagcccgcgctttatggcgtcggtgccgactaccaggacggcgacgcgacgctcgagcaaaaggtgcgtcggctcgactgtcgctcttcgctcgctcgcccgtcactgaccctgtcctctctctctttagcgcgccgacatcatccacacggcggccgtcatgctcgagaagggcaatctcgtcaagtatgaccgcaagactggcgtctttacctcgaccgagctcggcaagattgcctcgcactactacgtgacgtacgcgtcgatgaccatctacaaccagcacctgcggccgacgatgggcatgctcgagctcttccgggtctttgcgctctcgcacgagttccggcttatccccgtccggcaggaggagaagctcgagctccagaagctgcttgagcgggtgccgatccccgtcaaggagggcgtcgacgagccgacggccaagacgaacgtcctgctccaggcctacatctcgggcctcaagctcgacggctacgcgctcctgtccgacatggtctacgtccagcagtcggccggccggatcctgcgcgccatctttgagatctgccttcgccgcaactgggccgtcccgactaaggccgcgctcgacatgtgcaagatggccgagcgccggatgtggggcgccatgacgccgctccggcagttcaagggcgtcccggccgagatcattcgccgggccgagcgcaaagagttcccctggcaccgctactttgacctgtcgcccccggagctcggcgagctcatcggcgttcagaagattggcaaccgcaacgtcggcacgctcgtccaccggctcgtccactgctttccaaagctcaacctcgaggcccacgtcttgccgctcacgcggtcgctcctcaagattgacctgacgatcacgcccgacttccagtgggacgacgccttccacggcgggtcgcagctcttccacgtgacggtcgaggacgtcgacggcgagatcatcctcgtccgcgaccagttcctcctccgccggcagtacgtcaccgccgacgaggacaagagcgagcaccacatgacgctcacggttccgatccacgacccgctgccgccaaactacttcatcaacttcacgtcggaccgctggctgcacgcagagacgaagctcgccgtctctttcaagcacctgatcctgcccgagaagttcccgccgcacacgccactgctcgacctccagccgctgccgacgacggccctccacaacgccgagtttgagcagctctacgcccatgtcctggcgttcaacaagatccagacgcaggtcttccaggcgctctacacgaccgacgacaacgtctttgtcggcgcgccgaccggcagcggcaagacattctgcgctgagttcgctttgctccggctctgggccaaggcggcgccgaaaaaggccgtctgcgtcgagccctaccccgagatggtcgacctccgcgtcgccgagtggtcggccaagtttgccgaggtccagggcggcaagaaggtgctcgcgctgacgggcgagcaggcggccgacctccggatcctcgcccgtgccgacgtcgtggtctgcacgccctcccagtgggacaacctctcgcggcgctggaagctgacaatccgcaaggccgtcaccgagattggtctcctgatcgccgacgaggtccagctgctcggaagcggcgccgtcggcccggcctacgaggtcctcgtctcgcggacgcgctttgtcgcctcgcagactggcaacgagacgcgcatcgtcgcctgcggtgtctcgctcgccaacgcgcgcgacctcggcgactggatcggcgcctcggcgcagaacgtcttcaactttgcgccgagcacgcggccgctaccgatggacatccacctccagagctacgacacgccgcacttcccgtcgctcatgcttggtatggccaagccggcctacctcgccgtcaacgactgggccggcaagaagccagtcattgcctttgtgccctcgcgcaagcagtgcaagctgacggccaacgacattctcgcctactgcctcgccaacgaggagggcaagcgcttcctcaacatcgaggaggaggacctccagccgcacctcgaccggctctcagactcgggcctcaaggagacgctcgcgtacggcatcggctactaccacgaggcgctctccaagtcggacaagcgcatcgtcgagcggctgtttgagtcgggcgcgatccaggtcctcgttgccagcaaggtgtgtcgcacgcgtctctttccgtctgatcccgttcactgacttctgatacctaccctccccgctaggacacggcctggggcatcccgctgacagcctacatggtcatcatcatgtcagttcagacgtacaacgggcgcgaccaccgctacgtcgactacccggtggccgacctcctccagatgatgggccgcgcctgccggccggccaaggacgcgagcagccgctgcgtcctcatggtccagcagacgcgcaaggagttctacaagaagttcttgagcgaggccctcccgatcgagtcgcagctgccggcgatgctccacgaccacttcaacgccgagattgttgccaagacgatcgagaacaagcaggaggccgtcgactggtgcacgtggacgtggttctaccggcgtctttcgcagagtgcgtttgcgcgatttgttccctggacgacagcagcctgaccctcgctcctctccttctctcgcagaccccgtctactacaacatgcagggcacgtcgcaccggcatctgtcggaccacctgtccgagctcgtcgaggagacgctcaactcgctcgtcgcctccaagtgcatcgccatcgaggacgagatggacgtctcgccgctcaacctcggcatgattgccgcctgtacgtcgagctcctcataacttctcgttgccctctcgtcgctgacaccttctcctcgcttggcagactactacatctcgaatgtgacggtcgagatcttcagcatgtcgctcagcgagcggaccaagctcaagggcctgctcgagattgtctcgtcggcgtccgagtttgaggacgtcccgatccggcaccacgaggacctcgttctccggcgcatctacgaccggtgcccggtcaagctcgagcaccaggactacgagtcgcctcacttcaagacctttgttctccttcaggcccacttttcgcgcatggtgctcccggctgacctcgcgtcggaccagacggcgatcctgaccaaggtcatcagcctgctctcggcctgcgtcgacgtcatgtcgtccaacgcctacctctcggccctcggcgcgatggacctctcgcagatgtgcatccaggccatgtgggagaccgactcgccgctcaagcagatcccccactttgacgcggcgacgatcgcccgctgcaagcaagccaatgtcgactcggtctacgacatcaccgagctcgaggacgaccagcgcaatgacctgctccggatggaccagcgccagatgtgcgtcctgcttaccgccggtcacctgcacgaatcgatcgctgaccttctacctttctcctcgccaggcgcgacgtcgccaagtttgtcaacgcctatccctcgattgaggtctcgtacgcgatcgacgaggctgcgtacaacgcgtcgacgccgatcacggtccgcgtcacgcttgaccgcgaggccgacgaggacgaggacgaggccgaccagtcggtcatcgcgccgttctacccgggcaagaagctccccaacttctggctcatcctcgccaccggccggacgctccagggcatcaaaaaagtgacggtccagcgcgagctcaaggtcaagcttgacgtcacgctgccggccggcgatcacgagatgaagctttacctcatgttcgtccccttgtcctttttgacccagtctcgcccacccgatactgacttcctcttgcacttgccctccagctgcgactcgtatctcggagcggaccagacgttcgacctgccgaggatctcggtcgccgagggcgaggactcggacgaggacagctcggacgaggacgacgacatggagtgagcgtgcgaaggcatcgcgcgcggcgtgtggtggcaggaggcgaatgctcccgatcaagagcttgtagaacgattatcctctatgtgcttgtttccccttttgagaaacggcctggaaagcgtgaaagcaacagtcatggtaacaggcgatgtaacgaccagactgcggaggggggtcccgacccgagcgaggtgggcaggcgcgcgctactggagggccgcgcagagtgatggctcgcagtacagcgagatggggccgccggcgggggcgccggtgattcagcgcggccatgaattgagccaggcgggcggcgggccgagaaagccgcgggggcaccaagcggcccaggatggacgaaggatggcgagtgatgatccgaccgatgactggccgaacgtcaaatcatgtgaccaaataacttcgccgccgctcaggcggcctcgatgtgctgcctcttggccggtacaatcgtccgaccgacgtccgtgagcgcgtcgagatagcgctcatcgaccggcgccgagagcgtgctgacaaagacgcccggccggatcgactggatcgtccggaagaagcgtggcgggccctcggcctcctggtcggcccggcgcgaggtcttggagggcgacgagcgtgatgttaggtgcgacgacggcgcctcagcgggtgctttggctcgtgtccgcgtcgactgcgacttaagcaggcggttgacggtctcgatctgacgtacggaggggcgcaaagaatcagaagcgacgaacacgaatcacaacgacgcggggccacaccttgtcgtcctcaagcttcttctcgttctggttcttgcgccggcgggccgtctcggccttgcgagcctccttctcggcttgcgtccgctcgatcgccttggactctgcagcgcaaggtcgtatagcaagattgtgtccgtcagacgacgttgcagagggagggctgagccaggacgtaccgtcggggagcatcatgagcggctcggcaaacgaatcggtgtaggccgcccgctggcgtgccgtcaacttggtcaggtctggcgcaccgcctgcgcctcgcgacggcaccttctcggcgtcgtcatccgacgagccaaagggattctcctcgccgtcgcccatctcgtcttcgagctcgtcggccggaaccgaggcgtcgagctcatcgtcctcgtcgtcctcatcctcgtcatcgtcgtcgtcgtcgtcatcttcggacgaggcgtcctccgattcaaggtcctcctcgtcgtctaggcagatgcagaaggtcgtcagcatcctgcgcgacgcatttgctgcaaaaaaaggacgcaccctgtgctggcggaggtggcggtggtggaggcagaggcagcgccgccgctttgcccttgcctttgtgcgccgcagccttggcctttgcaggcgctgaaacagaaggcacggcggtgggtggaggcgtcaccgaggcggatgacccgccctcaagtggcttcttcttcatgttgaacttgagcttgagctttggcgggtcggccaaggcggcgccggtcttcaccgctgccaaaggagcagcagcagtcttgcttcccctagccgctgccttggtcgcggtacttgtcgtcgcaagcttgatggctggaggcttggaagacgacgccaccgccgacgtcgtcccccgggcgctggcagtcgaaagtcctgcggtgcccttggccttgggcgccgatggacgcgccgtcgtgccaacctcgcgcttcggcttcttggccggcttgcgctgttcctcggcagcgaacgaggccgagtggtcatcgtcatcgtcgctgtcctcgtccgacgatgtgaagaaggggctctgggcggcggttgaggctgctctcgaggtcgacggcttgcggggcgaagaggacgcgagctcgtcgagcatctcgccgtctacaggagcaaggagcagagtaggtcagccggagtgtctgtgtggtgcttcattaggatgagagagcagcgcaccatccacatcgggctcgctcagctgtaaggaggcaaggagcgggtcaaatgtcggtctcgacgccagtgcgacagtgatgaaggagcgagacggaccatcgagccgtcgtcgtcctcacttgactcctcgctgacgacgcgggaggctttgttcgaaaggcgggccatcggtctgaactttaagttgctgtcggtctgcctgaggatagaggaggcaaagtagagtcgtagcgggaagcaatgtggtcgagaggagacggcagcaaggctgcgtcgacctgagccggcagctcgtgcgtactctcgccggcggccgttgtgcacgacggcctctgcccggtcgacctccaccaaaagtcagagggcgtgaaaaggtcgtcatgggatcatcgttaattgaacaggcttcgatcggctcggcaggtgtcagaactcagaggctctactcctccagctcgtcggcctcgcggatctcgcgctcgatgcgctcgcgttcggcctgccgcatccgaagcagcgtcgcgttttcgtagtcggccgtgcccccagggccaggcgccgagccgaaagacgggacgggagcggcggccggatcgaacgagaacgatggggcgaatggtacccctgtcgacggcgacggcggcggcacagaagggcgtgctccgacaggacccgagcccagagttgcagacctcgtcgtcgtcgatgctggcggtgatggcggtggcggttgagaagacgcttgcgagccgagccgagcaacccactcgggctcctctcctgcggcccatttcgccttgacgccgcccttcgagttgagaccgcgggtgagccggcagtcctcaacgagcgcccagcagccggcgaggttgtcaggcgcaaactcgagcacagccgagacaacctccttggccttgcccttcttgaccgactttgtcgaaaccgtcggcgcccggagcagcgagtaagcgatcaggccgtacgtcggccggaggtgcgcctcgagcatcgccgacgacgtcgtcacgctcgcaaactcgggcagcggcaggctcagccgcaacgtccggtcagcagcaccgacctccttgctgctgctgctagcgctgccgttcttagcctcctcgcgcgccctggcccgcaagttgaggctctcgcgctcggcccgcttgagctccatccgggcaaagtcttgggccgcgagcctagccgcctgcgccacctctcgaagctgacggccctcggattggacggccgactcggccgccttgaagtggacattcttggccgcgtcctcgcgagacttcttgaacgcctcctcccgggcgacgaggtcctgcgcggccgggatgggtcagctacggtggcggaggaggggcaagcagctagcctcgagacgtaccgacaccagtcctcgcttccgcgaagcaaagccttccacccgcgcggccttgcgctgtttctcttcggccttggcgtcatacttggcccgctgaggcgcgtcgagcaggatcgcctgcgcgaccgacaggaggtggaactggtgggcggcagccgggttgtccgggttctgcaaaggtggagaaggtggcatgatcaaaacgagcgaggccgacacgtacgacagcatcagacgacgacgtacccggtcagggtggcacttgagtgagaccttgcggtaggccgacttgatctccttgtcggtcgccgccggcgtcaggccgagcgcagcgtacgggtcgaggttggcctcgtcttcggtcgcagacatggcggcgtgcttgctcggatcgagagcgtcggttcacctgtcggcaaggcttctgtgcttcgactcgagcgcttgagagtggggtaatcgaggtggtcgtcgaggttaaggcaggctgctcgagctgatcctctcctcgtccttcccgtcgctcggtcgcctctgtccacgacgcctcgccctgctcttcccccttctctcactcgcatcatgtcggcgtcaccctggcggtcgctgccgatcccgctctcgcacctctcgctgccgctcctcctccgggcgggccagtcgttccgctggctgctcacgccgccctcgcccgcagcggccgacgccgtccaccggcagcacgccgtcttctcgctcacgctccgtgatcgggtcgtccagctcgcccagccgagcgagcacgagatctcgtaccggcatatctcgccctcggggctgggctctggggcagcagggccgggtctcgtcgacgtcaagccgtcggtcaagagcaaggtcggaacggccgcgcaggcgaccagcagcaccacgcctgctgccttaccggacgaggcaacgacggccgcctggctggcagactactttcagcttgacgtcgacagccaggggctttgggaccagtggcggtcgctcgacccggtctttccgcggcgcgagagccagctcctccgcggcatccgggtcctcaagatggacgtctgggagtgcctgttcaggtgcgtcttctcccaacgaaggtcggctcttgcctttcctgacgcttttcgctcgccgtcagcttcatctgctcgtcgaacaacaacatctcgaggatcaccctgatggtcaacgctgccgccagctcgttttctccgcccctgctctcggccggcgacaccgtctttcacccgttcccgccgccatcagccttcctcgcggccgacacggaagcccgcctgcgtgcgctcggtttcggctaccgggcggccttcatccatcggacggccgttgccctctgcgaggcgcaaccgaccgacccagagggctggctgcgtgaagtcgtccgcgagtggccagaagaggagcgggcgcgcgaggcgctgatggagtttgtcggcgtcggacgcaaggtcgccgactgcgtgctgctcatgagcggtggcgaccggcgcaagcacatcgtgcccgtcgacgtccatgtgctggtgcgtctggccttcgtttattgatgcaagacgcacaggccgaccgatcagctgacgcgcgtaatcttcctcagcggattgcgcagaagttgtacggctactctggcgccagcaagagcggtcagaaggtctcgatgacgccgccgctctatgcctcggtcgaggcctcacttcgcgaacgatgggggccgcacgccggctgggtccaggcggtgagtttgcatcgctcaaccggctgctttcttcacgtccccttgctgacatccgctcctgcttcgctccttgcaggtattgttcgcgtccgatctcccggcgctgctcaagtcggagccagcggtcaaggtcgacgtcgccgagccgacattgagcgtcctggcgccggtgccctgccagccgatgctctcgccagatggcaccccgccgcctcctttccagtctgtcaagcgcgagcccagcaacatattcactgcccctctggccttcctgtcgacgaagcggacggcagtcgtgacgaaggctggcggaggggatgtggtcaagctcgaggcgcgcgaggtcgagatcggcgctggcctcgaaggcgccaacagcctcggcgagcgggtcaagaagcgtcgccggacggctgcctcagcatcggcttcggtcaagacggaaacccgcggccgataaacgctcgcaacgcgacggcccgtccgctcgtaggacgactctcgaatcgacgctcggccactgccagctgcgctgctgagtctcaggccggccggctagcagcaccggatcacaaatccacgcccgcagcatcttcatcgaccgcaagactagggcgagcaccttgatcggatcgcggccaccgcgagcgttcgacagctcctccttctgccaaccccgcagcatgatcccaggagtctgcgcgcaagacgagcgggtgattgagatggaccatccagataagtagtctacagtaggaggcaaaggagacagataggagccgaagagaggagccgaagagagaggacaggataggaagacaagtaggcggacgggtatcgagcgttcgggggaatgagaggggcgacccttgcttagaggccgagggccgagcggatgttggtgaggccgagcgacgagacgagcgtctggagcgagccagcggtgccgttgacggtcgtcaggttcttgagcgtgttcttgacgaggagcgcggctcggagcaggctcgtgacgccgttggcaatcttgttggcgccgacgatgatctggctgagcgacgagtcgagaggggcctggagcgcctggagggccgtgttgagggcggcgccgtcggcctgagcgtcgtcgacggccgagttgagctggacgttgagggctggtagagggcgcgaggtcagaccagacgcgctgaaagtggatcgcatccgacggacgtactgttgagcgtcataaagagcttggtcgtgagcgagtcgagcttggcgacgatcgtgcccgtgttagtgagcgaggcaatgaggccgttggcgcctgtctggccgacgagctggtcgatcgccgaccgggcggtcaggaggttcttgatggccgcaagcagctgctcgatgagctggtagagctgcggggtgacgtcgccgaggccgctgagcgcgccgccaatgtcactgacctggccgccaggctgagcgggcgagaggatatgcgaaggtcagcgagagggtcgcaagagaggggttgagatgagacgcacgagggagccggtcagaccctggacgagcgacgtgagaggggcgagcgatatgaggtccggaacggaagggacgccgggaagcgacggaacgccggggatagagggcacgtcggggatcgaggggacgcccgggatcgagggaagcccagggagggaagggacaccggggatcgagggcactcctgggatcgaaggaacgccggggatcgaagggacaccggggatggatgggattccagggatggaggggacaccgggaatggagggaacgcccgggatggagggcacaccagggatcgaggggaggcccggaaggatgccgccggtctcagcctcgccgccgacgacaaccgaggcattgacggcaacctcgagcccaccaatgatgctgccgagcaggctgttgaccgcgtcgggcgaggcgacgaggccctctgagtgaagcgaaagcgagcgtgtgagcagggtgggccgcaaagaggcagcaggacgaggcagagccacgcacggatcgtgttgaggacgggcacagtggccgcctcggcgttcgagacgatcgtctggagctgagtgattttgctcgtgccgccgccgaggagggaggtgaggccgccggtgcttccgagcaggcgcttctcggcttcgccggcagagagagggccggcgaccggagcggcgagcgagagcgtcgccgacgaggcggcgcagatggaggcaaggagagggatgaagcgcatggtgcttgatgagaagagttgagggagcgtgtgaggcttggaggagtgagtcggtgatgggagtgatgcgaggtctgggtgtgaagaagccatcccgagccatcctcgctgtccgtcttatagccttgagcaagagcacgccgaatggctaacgagatggcgaacttgctccgagacgaaccgacagaggtgaggagcgaaacgctgttctggctctggtgctcctcgtgtcggtcggaagggttggcacaccacggaaagcgaaggggtgcggaggtgagtctggccgccgtgaacgccagccgtcatcggcttcaggcgttggcgcctctctcgcgtgcgcatactggcagcgaaagcgtcggcagagcggacaaagcgtgccaagaggagtgcaagggcttcggatgagcgcctcgcctgagaccgagctccgttgcgttgggccctccctgaccgctctcctgacccacccgctggtctggggtagcggccgccgaggctgagattcagagcaggcccgcaccttcgggtgtgtcaggcccaacaagccgactggagtcgcattagcctctagcgtcggcgcctaggacgggtgaggcttgggtgaggccggcgcgagccgagcgtccaaaggtcggtcagagtttcgaaagggattgaatctggcaggacgggagctgtaaactggtcagcgttctgcaatcagcgggaggtcaggcaggcagactctcgcaatggtgagcaagtcgagacagggggagggctggccaaaggcctaaagtgaggactggcagcagaccgacggggcacagcgcgttagtggccgccgaggccggatggccggcgtcgagctctggaggctatcggcttgaccagtcgagcgggtcaggcagcgtggcaaggagcaagagagttgggcgggatggccgtgcgcggtcgaagagcatcgcctcgagccggaaattggtttcggcccctgaccgaccgccctgtctcagcccgcagctgctccctcagaaactccctctctcggacgggccgcgctgtctgctgctgcttgggagacggcagacatgagagacggcggggcaaaggtaagcaatagtgggaagatggtgaagaacatggaagggaagtaaagatggggggcgtcctgcagggaccgacgacgacagcgaggcatggccgcccgtcgggtcagacgctgagcgcagaagacgccgcccttttggaaaggaaggtggtgggaagggaagggctcggtcgccgggcaggatagtgaggcccgagcggcgagccctgtcgcgcggctgcgtaaagaaggagggcagggcagatcaagtgttgaagggaagaagaaggcaaagcaagtgtgtgaggaaatgcaagagtgagaggcgtggtggaggagacgttgggcgtgtggaagagagacagaatgtgaagctgaaaggcgttgaatgcgggtccaggagcctgccgaggcggcggaacgcttggcgccgctggcggacaaggttgagtgaaaggaagagggggggggggcgtacaatagcccgcggcccgggtcggcggcggccgcaaggtgtaaggtggaggcaaagagaggggttggcaagcggacggaggttggtccagatgcgttacgggtgcgcgtagccgtcggctggcgaccctctagaggggggtatcggggggttgcggcgccgctcgcctgaggcgagaaggggggtcggcccgctggtactgggacgacgagcccgctgcgcggcgcagttaagacgcccggttggtcgcaacgaggcgctgacggaggccaagcccggggaacgcagcgactggccctacgaaggtcggccgctcattcgaggtccatgtcgacgtcgtcctcgttgacggtaaagaggacctcgtccttcgagtcggccgccgggccgagcgtcgtcgccgcacccgcgccggtgccagtccagatgcccgacttgccgctgacggccgagaggagcgggctcggtccgccggcgccgttcgcgcccgagccgccgttgccgccctggcctgcagcccgctgagcggcctgagcctgctgctgggcggcggcggcctgctgagcggcagcctgctgagcggcggcggccgtgttgttgttgtgggcgtgcgagccgacgcctttcgggctcgcgtgcttgccctgctggatgagggcgaggccgattgcgccgtgggcgccagagttgagatagtggtagcggaggccgttcatctgccggtagcgctttgtgcagccgccgccaacctggcagacataaggccgtgacttttcctcggcttcggcctcggacaggccgttctcgaccgcgtcgcggatgtcaaagttgcactggccgaccttgaggtggtacttgaggccgttctgctgcttgtatgacttattgcagccgggcgtcgggcagtggaagagcttctggttcgtccctggcggcggcgggacgccacccgggtgggcgaggtgtggaatgatcgtcccgccgccggtcgccgccgtcgggatcgaggcgacggccgaggcgaccgtcggcgagccgccgggcgtcaacgggagcgcgccggccgggcccgagccggcaaagaggagcgtcggcgggatggccgacggcgtcgaccggctcccgggcacaccgcccttgttcgccccgggcccaccagtcgtcgagaggcctagcgggctcgggccgttgccgccagccttgtagccatcgtcccaggacgggtccgactcgaggtccatcgactcgatgtcgttcgagccgcccgacggcgtcacaggcggcgaggccggcagcgtcccgtggacgtcctcgtactggcagaggggggcgaggggagccgtcagccggccgcacagaggcgtgggagacaggacgttccagcagatgaggaacgcacgtgctcgagcaggtcgtgcatcgagttgagctgcaggccgcagcagttgtagttctggcagaagtcctgttcgcgccgggccatcttcatggcgccaccaaacgagccgtgcaagctctcgagcgaggtcgacatggccatcgagaagtcggtgttgctgcgaggaggaagagagcaacatgttgcggtcagtctgctgcaataccggtgcagatggtcgatcgtcggataaatgacgctgtcgagagccagaggtgggatggttgggcgtcgtcggagcggcctggtaaccaaacacggtgaccgggcttcgcggcgagaaggcgagctactcgctcgtcccctgtccctcggctcgacagcccttcgactccctcgcgtcaggtcgacggatgtgatgagccggcgagccctgggaaggacgccaggcaaagactccagcgatggtccgccagcaggctaccggcggtgggcctgccctccacactctgctcccgtttggcgaccggcgacaggcgccgagagcctagcagcgcccctatcaggcaacatgcccgagccaacatcgccctcgcaagaggtgtcgagaaggagaagagagagcgagcgggagtaggaggaggactcactcgacgccgccggcttgccaaggaaggccgttctcggcaccgacgaagcggcccttccagctgcccatccggaccatcttttcgtcgtagctgcccatctggccgaagccgccgccaaagccggtgtacgagcccggatggccgccaccgccgccgccagcgaccgtctggccaaaggagccgagccggaacgagcgggcgagcgaggcgccgtaggagccgctgaaggagcccctgtgcgaggccggcggcgagcgcgggccgttgttggacgtcgcgaagccgatagggatcgaggtcggttgagcgccaccacccatgccgctgccgccaccgtgctggttcgagctcgacgggatggcgaacgagggtgagcccgacataaagtggttgggtgcgggcggttggaggccgccgccgccgccgccggacgccgacgccgaccggtcgatggggagcgggctcggacccggcctggaaggcgggctctgcagcatgtgtgcgagggagcttggagcgtagagagaggagtgggtgggctagaatggacgaaagcgggtacgagagggggggagccggcaccggttgggcgcagcgcgggaacctgggcgcgccgccagcgcctgacgacggcccagcggccacccgggcgccacgccctggagtccgccggactctttcctcctctctcttttcgctcccccctcttcgctagacgaccgctcgctccccctcctaaacctcagtcgttcacggagtagtcctgagactgagtcggccctgccttctgtctcgtcctacgttctctcacttctccgggcgcgtgctcgcttcttcgccttctaagttgcgctccctttctccgcctccgtctcctcctctcgtctaactctcgaactcctcgcctcccgtccatagacccgccttcgtcattgcatgcccattacaccctaaccctagcaaataagtcggcgacgggctcctcgatcagccttgggtgagagcgagaggaaactctcgtccgcgcacctcaagcaagcttagccggagacggccctttccatcatcaacgagcgtatctaggagcaatcgcgccgaagcgagaggacgattgcgtcgaaagggttgaaagtgaggctcgggcgagaccgaaggcaagagatgtggcttagcccggccggtcaccgacgtaaagaggccagctgagggaagatggactccggctacgagggctagcacgagtcttgagatgctgtcagtccgaagggaaggaagcagggtggccgtcgctcgcatgctgtcgaggtcgaagctgccggcgcagcacccttggcagcaccgctcgctgcctgccggaggagctcgcagcagacccgacggatgagctgctgcttcatctccctcctgaccaccatctcgctagccaggcaagttttgaccatccctttttcagccagtcggcgtgaaacacggctcgccagacctcctagtcaatccggccaggccaactcaccatcccagccacgtcgcccagcccaatctccccggcccgacctcgacccgtacctccctcccacgacctccccttcgagatgggcgccattccggacggcctcgagcctctcctgacgtccgggcaggtggaatcgtaccatcgggacggctatctcgtcgtgccatccttcttcgacgaggccacgtgccaggccctactcgagcggacaaggcacctgctctcgtccttctcgcttgacgaccacccgatgaccaagttcacgaccggcggcgacgatggcagcgaacacgtcggagatgactacttcctgttgtcaggcgaccagacgcgcttcttctttgaggtgtgtcgcgatcacagcttgactgagaggtaaggacgagctgacagcccgatccgctgcaggagggcgccctcgacgccgacggcaagacgtttaaggagggattccgcaaggagacgtcgattaacaagatcggtcacggtatgcgatccctcccatgctcaaagacttagtcccgcaatcgagccgcaggctgaccttgcctcgcctctgcgcatgcgcttggcccaaggcctgcacgagcacgatcccgtcatcggtcccttcatgctatcggagaaggtgcagcgcgtcgtcgccgaccttggcgtccactcggacccgcgtgtgctgcagtcgatggcaatctgcaagcagcctcgggttggcggcgctgtcccgatccataacgacagcaccttcctctataccgacccgccgacggcgctcggcttctggttcgcgctggaggactgcacgacaacgaacggctgccttgtgcgttctctcacagcgcgtgtcctttacactgattcgaacgctgacagcgaccttgtccgatgcagtctttccttcccggctcgcagaaccggccggttcacacgcgtttcgtccggcttccgcagggcggcactggctttgttgccgtcccagggctcgaggacgttaaggcggcagaggaggccgaagggtttgacgagtcggcgttcaagtgcgagccctgcaaggccgggacgctcgtcctcatcggtcgggtcgtccacaagtcggagcggaacctctcggagaagtcgcgcttcatccttgcgcaccacattatcgaaggcgatgagagcaaagccgtctacgagtgcgcagcttctttccttttgtgctacctcgaggctttggctgacgttgtcacctctgcgccccctcagcgagcagaattggctccagctgccaggccgccggccgtttacgcccctgtttccctagagctacctctcatgagggtcacccggtcagcccttcggtttcacaaggctgacgttgcatcatgcgtgtgaacgctgttctttggcctctttggcctaggcggtcaccgagtcatctcgattggctcgcactgacggtgggagtcttgcgggcatcgggggacctgcatgagatcgaagctgcgctcggcgtgtctgcaagccgatcgactgtgtcggttgtagtagtcggaatgagagaccctgcggatcagaggcccggcctggtctagggatttgcgagatgctgacctaccagcgcgctcgttcgtcaagcggtcggcaactgagcaaaacatagcccgcgggtcagccttgcgtctgggcgaggaagttcagctgacacgagactaacttgctcgtcaaaagatgcttggccacgcacgatttaaaccagtggcgagaggatgaggctcgggcagggcgttcgcgcattggcggcgtgcctcggtcagaggtgtcaagttgtggccggtcggttgcgacggccggcgtcgggatgttactctgcgtgacgagaggcaaagtatccaaaagcgatatgctctcgaagtggagcttgatgggccaggctgacgacggaagacggggcacctacacgagggagagagaagagtcaggcctccgcagatcaatagatcaggcaagaatagagaggcaagcgtgcaactgcaaccgtctgtgctcagcgcgtgttgcgcaaagaagatgaacggaagaccgaacattagcgctctgccggctggccgccgaggacgttgccgcctcccgagaaagctgcgaagccgttcttgctccctgagccggccgagccagctgagccgccagagccattgccgctgccgccgccagagccaccgccgtacgtgccgtatcggacgtcgggcgcgggtgagtcgcccgctcgcaaatggcctgcggcctcgagcgcctgcctcaagtcgggccggtcgaggtagacctcgcggaggaggacccattggatccaggacgccggcgcctcggcgagcgtgcggccgcgatgcgagccaaagttgatgaggtattcgccctgttgccgggcctgctgctgtgtgcgggccgtgcggacggggaccgtacgggacatgatagccggtcgagaggggtgagcgcggggtgagagtcaggaggcaaacgacgaggtacgctcctcgtcagttctcgaggagcggtcggtcctcctccggcccggctgagatcagctcgccagtcgcttctcgtcgacagctcgagacagcagcgtcgtccgagcacacgattcacgttccgggcacttcgaccagctgtcgtcggtcgatgcgacgacgaatcatcggcagaccggctggccgggcctcgggcacgagtcgaggcggcaacggcggcgaccgaacgttacgtcgttcagcccaccaacgaccaccgactccctcccacccttcttcatgagcgagcgcagcagcacgacaccgccagaggcctcggttgcggccgaagcgagcagcaacagcaacaagaagcgcaaggctggcgagcccaagccggtcctgccgcgcaactcggttcgtccagagctcccggtcgaggccgccctccctcgtcctggccgaggctgggccttctatggctgacgcccaatcttgaccgtttcgcttgcaggcctgcctcaatgtgagtactctcttgaacgagcttgagggtacacccagagctctaaaggcggacgaaggctcaaggtggcacgctgcctgctggtctgctccaccggcggacatgctttgctaccgtcgactcacgctcgagtccacgtcgtcgctggcacaactactgacagaacgacctatcttccctcactcgcgcagtgccggacgcgcaaactcaagtgcatttcttgccacccgcctttgtcgagcgtagctgctgatcgacccgtcctgcccgcctctctccaggtgcgacggcgtccatccggtgtgcacaacctgctcaaagtcgctgcggtacgcaactgagcacctcaaggcgggcgtactgcctcctccgtgcgtctgggaggagaccgacggcgccgctgccggaatcctgccaaagtccaaagcggtcaagcgcgtgcgcaagagcgccggcggcgccggtgcgggtgcgactgcggccgacccgactccttctagcagtgcacgggccagcgagcactcgtcgagaacgacaagctcgcagcctcagccggaacccgtatcgtacggcgcagcaccgccgccgtcgatcgcgttcgtctcgcaagaaccctcctctgagaaccgccttccgcagcccatgctgcccctcggccacctggtcgacacgttccccgccgcccatcggccagatacctctcgtacctatcagccgccgctgcatccgacgccgctaggaggttcggccgcattggaggacgcacacaccctcgcgtccctcccttggctcttcggagaactcagccgcgacggccaggaaacgtttccgcctcggcagccctcagcgaacccaaatccaccttgggttccacttcagcccagctaccatgcgccggcgcctatgcaaaacagccagcaccctctgccgtcgctctactcgtccacgtcgacctcggcttcgacctcgaccgcgccctcgaccgagccatcgtcttacccctcggccagctacggccggtctggcgtcacttacgggtcagacagcgtgcgtgtcacggaaacaggctctctgccaccgtcaggtccaggcgtgcatcgccaggactacctgtgcgccccgacgtggcgggctgcgccctctgcagcgtccgcgccgccaatgggtccgccctcaaccctgccgggagcgaacggctcgaccaagatccatccgatcgacactgtcatttcggagcttttcgaagcctctcgggcgacgtcgagctcgtcgagcgggccgatgccttcgccctcgtacttcccctcgccgccgacgccggccaagcagacgtcaacgagctcgaccagctcaaagggcaaaggccgcgagacaggcggcatcgagggcgtctcgctgccgttttctgagcaggacatgacagccatcttttggccggggtatgtcttttgcccggctgtgcctccttcagcccgctctggctcacccttcctcttggccgtccagctggccaccctacctgccggcacctgaaaagatgcaccgcattatcgacaccttctttggctgcgcgcacatggccaacaacatcatcaacaagtcgtgcggccgacctagcctctgccgaccggttgcgagcgtctgactaaccattccctttgtccatccctcaccaggaaattgctccgcaatctctcactgccgcctactcacaatgccttcccgcatccagcgctcctccatgcgatttgcgctgtcagcgcccgcttccttggcgacgtctacatgcagcccgcgaatgacgctgcatttcccgagtcgcctacccggtcgcaccaccggaatgtgctccggacgccgggggccgagcgcccaacttgggacggcatcagtcatggccgcggcccaccctctacgtcccggtcgggcatcgatggcgactttggcgaaattcacgccacttgggcatcggtgcgtccggctgactcgcaggcctcagtcgtctctcggcactcacgcctcggctccatcctgtctcagctctacgcggaagagtcgatcggtgacgcctcgtgctggatggccatcgtccaggcctcgaccctgctcgcgcactactatatccagcacgctaagtggtcggccggctgcctggtcaatgcaagggcgatgcggtacgtccaattattgcgcgtcgtgctgacgtttgcagagcaaagctgacgaccgtctgacgtgtttgactgactgcaggatgctcacgccgcttggcctccacttgaaggacatccccgaggcgatcggagcgctctttccttcgccgttcgacggtattgaaatcagcgagcgacggaacctcttctggaatctgtgagctcgtccgccttagccctggtcgacactcgagacgctgataccgctgcttgctcgacctcaacaggttcaccgtcgacacgctctcgtcggcggcctcggcgtgggctggcatgattgacgaccgggccgttactcagtggatgccctcggtagaggctagtgctgctaagaaggtgcgtttgttggagcagaagtagcccttgccgccatccctgctgacctcgagttgtcgccccgcaactgcttcaggaggcagacggctcgcatgactgctcgcagtcaatccacgcgtatcgcatcttccacgagcacacgcccggcatcacctcgatgcagctcatgttcaagtcgatcctcgtcctccggcgcgtgcacgagttcctccggctcaccaagacgcttgccgtgcccgatgcgcaagaatcgggcgaattccgccgactcgacgccctcttgagctcgtttcggcagagtctaccggctgagtaccggagcgcagtccgctatcagctatcgccgacagggaccggccaacatacgcttgaccttgacacgcttatgtgccacgtctgctcgctcaggtacgcccgcgatgctgggctggcggcgctctcaggctggccgctcaacctcacgcctctgctttcgtcagcgccgtcatccagctgcacgaaactttcgccaaagtcttcaaggagagtgactactcgctcctccgcatgctcgccgcctcgcgcggcattatcggcattgtgcaccagctggcggcaacctcgtttgacctcagtcgtgtgcgtacccctgcaacgtgccagcgcatagttactcatccgctctcctcccctctcagcttcccccctacgcgtccttcaccttcttcctcgccgcccggtgcatcagtcacgtcttgcgccgggctgtccaccgtggcgaccgcgaggttcaggccgcctgccgggtcgagatcggcctccttcaggcagccatgaatgaggtgcgtaacgtgggacccacctcttttcgacggcacccttgctgaccgcacttattttgcgaccattcgactcgcagatcggccagcgactgcccatcggcgttcgcgaaaacgtcatgtgcaccgccatccttaaagatatcgccggcggcaacggcagcggcatcagtcaatactcgaccggagagtgggtgactcttgccagcgcttgcccacctacggacccacctcgctgacctgctccctagcttttgcaccagggacttcgttcggagcctgaaagcgacgacaccggcaggctcgtcttcgaatgccggctcggccgagatcccgctgtcgacgttcgaccagaacatagaccggtcgaatgcgctcgtccattcgcacaagggcggcgagctgggcgccgacgaggagggcgggtcgcatcggtgggtcgagcagctcgcgctggaggtcgaagaggagggccatctgctcgggaactcgcttgaggcgacctggactggggacgacatgttcttccagaccctcggcttttagcggtaaaagtcaattcatgtcatgttctcgtctcgtcaaagggggcaatggtcgtgcaaacaggataagaagcgtctcgatctgcgacacacgtcacaggccgtcgagccggaggccgtttcttgctggagcgatggcgctgtcctcgacgccgtccattgcagcgtcctcgtcattgtcgtcatcgtcgtcgtcctcggcgagctccttctcgaggagctccttgctccggcgcatagcctcgccctcgttactgtagtgccggcctgtgaaaccagacagcgtcagatattgcaagcatgaaaactgccggaggggggccgagcaacgcaccccttgccttgacaaactcgcggtgctttgcctcctgctcgggcgtcatctcctcctcgtcctcctcgacctcgcctgcggcgacagtcttggttccccctgtaggggatccagcggcgtctgcggtcaagctcgaggcggggtgctcggacgcagggagcgagaaggatgtcgaccgagaggagggcattgatgggtgcgacgagggcggggaggggccgctgcgcagccggggagttcgagagcaagcagagtagcggtcggtcagcatcggcgagttgacatccccggagctacgctggacatttggtgagttgcaaccactgacttgctcggtgaagcgaggacgtcggccgtcgactggccgttgagcgtcccaaggtcgaatccggggacctctgtcgaacgggcaatcatcgagccggtcagccgcgctatctcgagaggcgtcgttcgaggaagtgtagacggaccgctgaggaccatatcgttcagagcgtcgtactgaacgaagggcgttttgggctcggtgattttcctgcgagggcgagcaagcgtgtgatggtcagctttcgggcaggtggaccgagccggctcggagcaaggcaccagcacgacgcacatctgcgagtccttctcagcttcggtccgagcgaggttctcctcgtcccatgtcaggctggatagaggcgagtgaaagcaagatcagctgacatgcagtcgttgagagccggccgaggagagggggcaggaactcggccagcgagcaagcaagcagtgctcaccctcgctcaggctcgccgacagcatcatcgctcgtcaccatcgacgcctcgggcgcctcgccaaagctgccgccgacggtcgcaaagctgcccgagccgccgctgctgacaatctggacggctccggacgaggcgttcttgaggatgccctttggccgactgccggccggcggcgtgttggcagcagggtgcgaggccgaggctccgtcctcgagcggaatcagaggcggcgcgttggcgccatagcggtcgggtgctgcagttgagaccatgatctgtatgtgagtggtggtggtggtggtggtggtcggtggaagagatggtcgaggtcttcgaggctggccgtcagcccaagcgcggcgcttccaggtaacgttcgcgaggcttcggtcggcactctccgaagcttcacctccgaacgaccctcaacagaagcggatgacatgtacatcgagagaaagatactgaggatgcccgttctacgctgccttccagccccgagagttgagaaggagtttatgataccacgccgtgacggtcaggtggccggcaaccgcgatccgctcgtcgaccgtgtggaaattcttgacctgggcgagcggggccgggaggaagcggaagatgtgctgggtgctgttccaaaagtgtttggtgtctgaaggagagaggaagagaggcgtcagctggcgaaggaggttgggcgtgaatggtatagaacgaaccggtgttggctgggcagttgagaaatgacagcagagagacgtcaacaatttggaacacagattcaaagcagtggaggacgcaccaatcatggccgacggggcgacgatcgcctttgggaagacgtgcctcgtcgtccccgcgacgagctcgaaagcaggtccagatgtcggcgtcagcggcgccggctcgaggcccatctcgctcggattcccgaccgtcagccggacgacgtcaaccgtcttgctcgacagctgctcgccaggcgcctcaaacgtcaggttgagcttctcaatgatcggccggaggacgccgacgacgtggtcgaccgtctcctgaacggacgacgtaaacccgatccggtaattggccgtcgcgctcgctcgctcgggaatcgcattgaccttgacgccgccgctgatgaggtcgacgctctgcgtcgtcgcaaggaaggccgcgacgatccggtcctcgtcggcgagctcgcgcgcgagcttcggccaagccttagggtccttgagccggcgcttgaggtcttttggcatctcgggtccaaagtcggccccgcactggaggtactggaggtaagggctctccgggtggaaggccggctcgaacgggtgctcctcgagctgggcgatgaggagcgcaagcagaccgatcgacgtgtgctttggcgggaccgaagaatgaccgccgagcgtggcaacctcgagctcgaggttgaccgcgcccttctcggcgatgccgagcgaggcaatttcgacgccaaaggcttcgtcgacgccagtgaagccctcgtcgacaatcagcgcgacgccgtccttgccgtagatctcttggatccgagcggcgaggccggccgcgcctctcgggcctccaatctcttcgtcctgaacagcgagtgaggccacaggttagcgtcgctttgacttgggcatgagcgcgaacgagccgacctacatggccaaaagcgagcaagatcgtccgctccggctcaaagccctgctcgacgagccgctcgaccgcaccgaggatgcccatcagcgtattcttgcaatcggcgctcccgcggccccagatccagccgtcctcgtcgacgtagccgccaaagggagggtgcgtccagcggtcgaccgtgaaggccgggacgggcacagtgtcttgatgtgctgagaggagctgacagagaaatggcaggggttaacaaagggggacgcagcatagagaaagaacaccacgaacgcacgatgggtttcaggtcaggagacgagccaggccaggtgtaaagccggcctaggtcattgacgagctcgagcgagagcttcttacggctggcagatgggtcgaaagacccaaatcagccgttgtcgtgggcaaggcgcacgagaaagggcgcgaagactcacacgcgcgggaactcgtcgtcgagaaacttgccgaagcgccggatgccgtcaaaacgctcgtcgagcgggccggtcgtcatgtcgtcgaatgagacggtgtcgatttggatggctcgggcgagccggtcgaccgccttggcggcgtaggccgagtcggcgtggatgtcctgtgcgagagaagggcagggttagcgcgagcgcagccgaggccgatcgagagagggcggacgcacccagttggggccgacgtcgagcggcttgacctgcgccggacacgagcccttcatcaggagagccatctctgcgccggtcgggtgggtccgctcgtaggcgccgaggacgctaaagaacaggcggatgatgaagaagacgagggcgccgtggacgagggccgtgccgaacctggagccggcggcctgcttgggtgtggcctggcggacggtaggttgagggagaagcccctcgcttacaaattgcttctctggcgacatggtgaaggaagggatggtggtaaagagagaagaggcgacccgaagcgacgaccatcgcgtcggcttcctccggctgggcatttcctctgtcggggcatcagctggaccaaatggggtagtttgggcttcgccgtcgaccagcacccccttgacctcgtctcctctcgcgacccaccatcgctcatcgccagcatgtcctcctctgccctccctccccgacccctgacgccgccttccgaacctcagtcgccctcgtcctctcgccaccggccgaccgctccgacaacgaccgacgacgagatggcctcgcccggcgaaggctcgtccgcctcgtccggctcggcctcagaggacgagatgatgcggctcgaggacgacctcccagcagcctacgcaccagcagcagcagcgccgacggcaggccatgtctgcatcgagccggccggtccttcggccagcagctcggcaggcgtcatccggtccgagagcagccggcgcgcgaccacccgctctcgacagggtccgttcgcgagcacgagcggcggcccaagcggcggtggcggcggcaagtcaaagccaaagaactctgggcttataggcagcacacgcgccgcggccggcaagggctcgtcgtctgcgtcggcgatggcagtcgatggcgacggtgggagcggtcagaaagacgaccggctcgtcggagtcgacgagtttgaccgactcgtcaatggtgcgtgcaatctcccgaggtcctctatggagcaaccgcgagggggcacggtcttgagccccctggtccgtctttctgggcctctccctgaccctccatccgccccctctgtctgtcccctctccgtgccgcgattcctctcttgcaatgcagacatcggcgacctgttcgacacgagcaacctccgctcgctcgcgtacgcctcgaccggcggagacggcgcttccgctgggcgctcgtcggtcccgattggcggcggcgctcctcaggcggcttgagcttcggtcgacgcgacgctattggctgcgactcagctgggacgcttcggtcgtgatcgacgatacaccgtcacccacgtcgcggcgcttgcgttcctcccccctccaaccctcggccttcctcctccgccgccttttttgacggtcggccggttggtcatcggccgctcgtgttgcacagccgtcccctttgatcacaacgcccgagcccgaccgtcattggcggcgccggcccatcttcgcatttcgagccccccagctcttcagacctctctgctgaaccgcatgcgatcccttcagcccctcacccggagcgtcgccctttgcgtgtcgccctttcgcctcggcaaccatccaccttccttacgccatgccctcgccaccgtgtcctgccacgaaacgcctcacatcacctctgatgaccccttccgccccgcttctctcatgcccccttcacctcaatctgccgaggccgagcgagccagactccttctcgctgcggatggccgcctcgagtaaagcgcttcgtgacaggatgccatgcctcaggccgacgctctggctcgccgagtcgatgagctcaggggatgctcgccgacgtaagtattcgggcgcgcgcggctggaggcgcaagtgagaagtgggcctggcgaaaggtgcgccctgtgaacgtccacggggatggcgccttgagcagcatccattgcgagagaacccttcccccctctactgcctctggtcgatcttctgctcccgctcgccctcgacgacgctccagtccctgctgatcgcgtggccctccctgctgaccggccgcttctcgccgagcgcgtccgtgttgttccagcggcccatgagccccatcgcctgggcacgcttaatgcccttccggactctccgctgcgagcgcatcaagagcccgttctccgcgcgcgtcttgatccgcccgaccgaggtgacaaaggccgagaggagccggccgttcaggtactccttggacgggtcaatcttgaggttgacgaatgggtcaatcggccgcaggaccgaggccgcgggcgagacgagcgcctttttcaggttcttggagcggatgcgcggggcgaggtggcgcatgttgaggtctgagggagagaggatctgcgtagagagcgtgcgggtcagccgcttgagagaggcgggaggagagccaggtacgcacgtcgcccttgttgaacggccgcatcgccggcggggcagccacctggccgagctcggcctctagagggagcgtagtaagaaagccatgtcagcttaggagcgaggttttgggcagtcagagtcccagaaagagtgtcctgtcaagtcggtaaagcagacgagggtcgacgtcgggccggtcgtgcgaccgaccgaccgacagctcccgagccagccgcccttcgacacctgaaacgcaggagcgcgcgacaaagctacgcacggtcgatcggggtcatgcgctccatcgcgctcgcccgccttggcggggccatcttcgggaacggctggtgggcgtcggtcggagcgcgccggttgccgggtgctgaggccagtgccgagcgggagaaggagcggagggagggggtcgagctcgggccggcgagcgacgagctcgtgctgctgagcgtcgtggtcatcaccgggcggaggagggtgcgaagtgaggtcgccattgttgctgctgctggtgcttgctggtcgaggtcgaggtcgaggcgaggacgagcgaaggtcgcggcggcagcggcggacggccctctgacgttgcatcattctcaatacattcacgcggcctacctgaccgcgcagtcaacggcgctgccccttcctcctcctctcgaccatctctcgccgccttgacccgacgacagccagcatggcgcccaacatccactcgctctcagacagtccaggacggacgaccaaacggtccgtcgccgcctttgcctcctcctcgccccggcccaagcggccgaccaagaagccgcgacgcttccgctccgactcgtcctcctcgtctgaagccgagcgccacacttccaacagcgaaccagacgacgacaacgacgacaacgacgaaggagcgatggcagttagcgttggccggatcgcctccctcgtcggtccgggtcgggcaccggccaagcgcgaaagtaagcctgtgccgctgccgcctgggctcggcgaggcgcgcagctcgacgcgagccggctgcggtcagagcgggccgagccagcagcggggtggtaaggtgcgttccttcgttgatcaaggaagcgtcggtgagctttatctaggagcgagctgatctcctctgtcggtcggccatcttgccttgcactcgctgacgggctcgcccctctcggcgcacgcgcgcacggcccgccccctctcggcccagtcctatgccaagatgaccgaccgcttccttcgcgaagccccgaacctcttcctctcgctcgacctcgcctttgactcgagctccgcttccaacggcgcccgaccgccgccggtaattccgccgcttgttctgcggccgcggacgatgtcgggcggcacgcagggctggacggcggcgaaagtcgagcgaacggtcgggctgccaagcaagtgtgggctcggcgaggaagtgaccgtctcagtccgtctgcttttctgaggctcgccatctcgcgtttcaaggcgagacgaaagccttttggcgcgatcgacaggcggaacgctaacctccgactcaatctctacttcccgcccacgcctctttttctagtttaacatcacagccaacgtcgtcaagcacaagttgtcttcttcgtccgcttcgacaacagacaagcgcacccagaggggcgggatgaacgttctcggcgggggcgcgccgctggaggcgcacgatgaggaagaggacgggcatgacgaggcggaagagcacctcgagtctgggggagagggagccgagaagcagacatcgcccattgcggtcggcaagaagacggaccacgcgccgtgggcgaagacaactactgcttcaacggcagccaaagcagcgccaacccgaggttccatctcccgcaccgctccatccccctcttcctcctcttcaaagcccgcccgcctgcccgcgcctgccgctcccgcagtcgacgaaggctcgtcggacgagcttgtcatggaagtagtctcggacgtaccgtcgccgcctcccgctgctccagctaaaaagagctctcggtcggtcaaggcggccgcagtctctaagccggcgggcaaggcgaccaagtcggcttccaaggctgcgccaaagggcaagggcaaggcgatctcaagcggcgatgcttccgacgacgacgacgatggtggcagcgctgggctgggtgcaggaggacagactgaggaggctcggcaggtaagggagcggatgctacgtgcggctgaggagcgggccaaaacggtgtgtcccttatccttcttctcttcattagccctcaggctgatccttgactttctcccctccttgcccgcctttcccttgcaacgccgcagtcgatcgggcggggtgtccaggcctcgcgccaaggcgccggcaagctctcgcgagcgctcaacgaggctaaccggaaagcggcggcccatggcgggaggggcatcgagccggagattgagctgacggtccgtcttgtccgctttgcttctttgggagttgttggtgacgtccaggtcgaaggctgacagacgctaatctccttcaaacaggcgcctaatgcctgggactgagggtcgaccaaaacgcccggctacgcctctgaccaacaacaaggccgcctcgccaataaaaaggacgcgcccatgcatttacatctttcactctcctcgcacctcttctcgtcgcgcctccttcatctccctggcaagccaacattcctccaacatcaggccctctttcacgaccccatttcccttagttcttctcgctgtcaccctacccgcccgctcgcctagtcgcttgacgactcctcaagctcccgctatgcctctgctttcctgctcgaagatgttggcgaccgtgaccgactctcggccaggcaagtacaagaggatgtcttttgagtcgccagaacgactgactcgcgagggccaacttcctgtgaaagagggctgccggggaaggaggattgacatttgatccgagacccgagccataacctggagggtgcgcgttggatcggatgaagggcaggtgaggtctagatcgtccgtttcgtctcgaagaaggcctgtccgaggtcacggacaagaagagggtcagtcccactcaataatgtgcagactaccggatgcaccgtggaaaacgagtaggcagaacttgtgcgcaccttgagatggtagacctgccaagcgcaaacgctgacgagcgcgagcgcctggaagatggaccagtacttcacgcgcgagttggtcgactcggccgctgtacatttgcgagtggaggggcaaggtcagctacgggagtcaaaagggggaagagggtcgggggacgcactgttgcggtggacgcgttcgcgtacgacgatgtactcctgctcgtccttgactgcaaagcgagcgcgcagaattacaggaggggaaggcccagagaggcaggagaaggtgcggcttatcagcctaggcggaggcgacacgcgtcaggacgcgcttggaacggaccatcttggaggccatcggcgagcttgcggatctccttctcgatcggcgccgtctggccgtcgtccgggatgtagatgacgccgtgtacgttgaagctggcgagaatagcaagtcagccctttgacacgcgaaagaagagcgctgcgcctgctcggagggccgaaggggcgacacgacgcacgagagcgtctttggggagacggtcgacatctcgttcgagaagcagtagttgtagcggccgtcgagctgcgaggtgaacgaatgggtgccggtcggcgagcggtgctggctgtagagcaccttggaagtggggtccttcagctgtcgggcgggtgaggggagattccggagcggcaggtcagcgcgagctggtagccggcggaggaaaggaggaggaacggacccagaagtcgatatcgaggtgcccgcctccgccgacctgatacgtgaccgtcatctgcgagcgggaggcagtacaaggagctccaggtgtcagcgagtcgttcagcggacagggagcccgcctccccgaggagctcgacgcgcacctctgcgtacgcgagctcgctcgaccgaacgcaggcaggctagcaagctcgacaacgacgacgaggcagcgtaagaactggacgtacgacatcctttgcgctcaggtcctcaaagaagcactcttttgacccgggcgcgagctcgatgctgtgtgcctgagcggccgggaggaggctgagcgccgacgcaaacacgagcgcaagcacgagccggaaggggagcgggctgagccgggcgagcatggcgtggagcaaggcgagctggtcgtaaaggtccgagagacgatggtgctgtgatgtgatggtgctgtgctgtgcttgggctgggctgtcgtaagtcgttaggtgcgttgctgctgatggtcgtcgggagggcgaaggtgacagccggacgaggtcgcagccgcccgcagacggccacctcttctccctcgccagcccgaccgaccgtatctcgtctcgacaggacgaatctcgcagtggccgtaccggagctggcacctatctcgccagcggccggccaagagcgggtgtcagaccgccatgcagggcttcaatcgatgtgcgtccgcgtctgagcgttctcaccctgctcctccactgctgctgaccctcgtgctcctgatccttcgtctgtggacgcagaccacccgcccgacttcgactggaagaagcatgcgaccttcaacgactatcagggcaaggtcagtcacgtcctttcgagctcagtggccgtcgtggcgctaggactgggctgaatggctgactcttcggctgcgctcgcctccctcttcctctcgcaccctcgacagcacgcgctcggcgaccgggctcgcaagatcgaccagggcatcctgatcgtacgctttgagctgccattcaacgtctggtgtggctcgtgcgacggccaccttggcgccggcgtccgcttcaacgccgagaagcgcaaagtcggcaactacctctccacgcccatctacggcttcacgtgcaagtgcgcgagctgcggcggcaagtttgagctccggaccgatccaaaggtgcgctcacggctggtcaagtggtcctggtcagaggtcgtggctcactcgacgtcgcctgtgggcactgcctccagaacgcggcctacgttgtccacgagggcgctaagaagcagtcgaccgagtgggacccggaagactatggcggccacggcgtgcatggtgcgttgaccttcgtcgccgttgcgcgcgccttcctctgcgttcattcgctgacacttagctgcttcttgtacattggttagaccccgacaagccctcgacggccgacgcagacgctttctcccagctcgaaaagacgactgagcagaaggcggtcgccaagacggccgagcagcggctgattgacctgtacgcctactcgggccggacgaccgaggaccccgagcggctcaaccggcgcttgagggatggttttcgaacggagaagaaagcgcgacagaggcaggaggatgccgatgaggaggtgcgggcaaggtacggcctcagcgagcggatcgcgctcggtccgccggatgaggacggcggagaaggctcgatggctctggcgacaacctccagcgcggccgggaccgtctggaaagccgagcaggccgagcgagacaggcggctgctcctcgccggccgatcactcagtgaaaccggtagtagcagcaagagcaagggcaaagcgcgcgagtcgcacgaaggctcggtcgaccgccttcgtcggtccgtcttggccaatactgccaggcgctttcacccctttgctccgacaccgtctgccgccggcttgtcgcgctcatcggcatcaagcctcacgctgtcgtcggccttctcatccgctcgctcgtcagcttctcctcacccaccaccctctcgaggccggacgctcctcccaccaccgaagagccgtctcgcccaagctaggccaaagacggcgcctccgactagccgatcatcgccagcggctcggtctgggctcgttgactacgagagtgattgagcctgcttccgactatcgtacacgaccgccttcacgacctttttgatgaccaaaatctacgaccaagacgatgtgcgcaagagaagcatagtaatacagtgtcgcctgtcgtgtacagcggccggctcagtcttgggcgctggacatgatctgagaggtgcaggtgggatcagcgcctgagtaacaccggcgggtcgaacgaggacgtacgagatggccgccgtcgacgagaagcgtcgccgcgttgaggtagcctccgccagcgctgccgagcagcagtagcgtcgccgcgatctcctccttcttgccggcccggccgagtgggatgctcccgtaaagtttggcaaacttctcatcggccgcctcctcgtccggctcggtcatctcggtcaggaacaagccgggcgcgaccgagttgactctgaccttgaacgggatgagctgggcggcgagagctcgggttagctggacaaccgccgcctttgaggcgttataggccgctccgccaatcgagcgctcggtcccgaaggcgccgacggaactgatgttgacgaccgagggcgattccgacttgcgaaggagcggcaggcagcccattgtgagaaaatagagcgccgtcgtgttgatctcaaacgtctggctgaagctcgaccactcgacgtcgtcaaagagctggaccgcgagcttgtcgaggtcggccgggtggaggaggtcgatcgacggcgtcctgtcgatgccgctgttgttgatcaagacgtcgagccggtcgccgacgaccttctgcgtgccagaaatgatggccttgacgcctgcctttgacgagacgtcgccgggaatactggcggttgtaagggcggtcagaatagggggagtcggctgagcaatggatggcgcgctgccttgcgcaccagtggatgctgccgccctgctccttcaggccgtccttggcgtcgtcaaacagtttctgggtcttctgcagagcctcttcccggcgacctgtgatgacgacgcgggcgccgttgctggcgtctgtgtcgaaacggctgctgcgtcagctgcgtgggtcgcaacagaggcagatggaggcctgccgacgcacacgcaatcgcagcggattggcctattccggaaccgcctccggtgatgagcacgtccttgcccgcgacagagaagaggttggcaatttcaaaggtcgacatgatgtagcagatggtggttggggcgagctcgacgacgccgacgacgcccgccgggagggaaagagcacctcgatgcctccctcggacgctagcgtcattagccgccgagccgataagatttgataagcgggcctcgattgaagcgtcaaacagccaggaggagtctgcacaatcgagacagctcaacggcctcccggcccctagctataaatgagggtgcggcggcactgtgctcgagcgtctcagcctgccgagaacgcatcgctagagcaggttaaaccttcaggctctctccggttgcaagcgatgtcctcgaccatgcgcaagacagcggcgcgaacaacaccttgctcgaccggtttgctgatcaaacggtgccggcctgtcaacattaaggagcggacgcgagtcagagcgaggccttcaaggcgaccactatgctaaaggagcagctcgcaccgaggatcgccagattgcgaggggtcgggaagctcagaagcacgacctcgggcagaaagccacactgcacgctcaagctgagaaatgacgagacggagcgtgtcagctttctgcataccttccttggcaataacgggaccgacgtacgtttctagccaggcaaggtaagcttcgaagactccaacttgcaccttgcctaccgtccccggacccgtgttgcgaaagcgagctggagcgaagattggcagcgatggttcaaatgccttggcagcgaccacgtcagggagggtgtgactggggtagccgaaacagtgttgagtcagttgcttgagcaccggatagccaaaaggtgggcagactcacgcgcaacaggggatgttgagaaaacggccgtccctcgttaggctcgccaggatcgggatccacggcgtcagctcgtccgagtgattaccgatgaggaacatgccctcgtcgaaaggccctgcctctcgcagagcgagtgcgattgggtcgaccgctgcctgctggaggcacattcgagtcgtcgcgggataggctgcccagaccctgctcggacgacggtcgaggccgacgccgacgtagccttcagagaccaaaatgtgtacgactgaaagcaaaagaaaagatcagtcgatctagcagtctgccttgcccagcagggtgcgagctaactcacggagaccgttgccggcgccgaggtcaacgaactgagcagggcgtccccaagtcgaccggtcgttagagcgcttgccagtcgccgaggggtacatgtcccgccagagcagcatcagatgcgccgccaccgcaaagtctttggcgtagagtctgcatgactttggcatcagcatctggcaagaagccgtcagtaggcacgagacgactgacctcgctttgctgtcgaccgcgctgtacagccctcgccctgtatcttggccgtacttgcgcctgagctcgtaggatagagtgtcggccggcgctttcttgaccttgaccgagctgtatacctgtcaagtagggtcgtcagcttgggtcgggctgggggcaaagatgacaagaggttggacgcacattggcccgttcaggagctcgcttaccggccgtctcgaccagcgcgcgcaggtagttttggcacgagcgaaagagcgccgagcgcttgtcgacatccgtatcgacgaagggggtggcccaaagttgaagtatcggcggcccctgcgacgcgtcgacgacgtgcgcgcagcgcagcacgcgcacggctggctggccgcacgagacgtcggccgggcagtcgacgagcgatctgatctcgacccaggcttcagtatctgaccggccgaagatgaccttctgctcgagtggccgacttggtggcgtgggcaggagccggcggcggacgactctgacgatctcgacagcagcagcaccgcagcgggagtcggttgccgtcgttgggcccagccgagcctgggggttgtcgagcagcgaccactcgtcgaggatcctggaccgcaggatggcactcgacgtccgctccgggtgcaagacgagctccgacgttgccctaaagaaggttgcccggtcgaagtttactcgctggctgacgacgggcgacgcgatggcggctgagaggcgggctggcctgccgtcgtcgacggggaggtgcgaggtcggctcgaacggcgccgtctgctcattcaaggccgtctcggccgatgcggcgaccatgtagatgcggttcttcaagctcgctctcgtccaggagctcaaagaggagaagatgagcgcttggaagggacgtcgtgagccgcgaggtcgctcgccgcaggaccgaggagacgtggccggcggtcgagttccagagagatcgtccgatggccgatgcgacctggtgagcgcgagatagctgcagctgaggacgtgtacacaggtcgtgagggtcggcctgccaggtaccggtcgcagcagatgatggtcgttgggctgtcgccgccatctcatgcccggggtcgaaggtcgggcgggctgctgcgctgggagcgacgaccggctgcagacggttccttcgcggtgctctgcgaatgaggttaatcctcccctaacgccgcgccttggcggccagctgttctgaggaggacgtgtgtgatagcagaagagcgagtacaaagacgaggtcgtgggatggagggcggagcacaaaggaagcgaaggagggaagggggctctacagcatgaactcgccctcttcctctctgcgctggcgctcgcgctgccggtcccgaaactcgcggatcgcgttagcccgagcaaggaactgggcccgccagtcgctgactaagcggccaatttggcggaaagcactgtcgccacggccgccctcacgcggggcgtgctgccgctcgtcggctgcctcgccgtcgtcgagctcgtggggcaggctgaggtcgacgcccgggtacgacgtgttattggccgccgccgagtcgccagaagcagccgttccgcgggtccgataccaatcgcggatggccctcaagttgatgccgggcgccgggaccgccgagacatcgtcgtcgtcgttttcctgggcggtgaggagagagcgttctgtttgagcgaggaagggaaaggggtcgtccggtcagacgaaggtcgaacgaagagggctgccagaaaaagatggcaactgaccgtagcgcttgacgcgccagtagccgccgagcgaggtgatcaggatgaaccagccggcacacatgaggacaaagctgagccagtcgttggcctcgctgacttcctcgggcgaaggcagattgaggccgggcactggaacgttcgggtgggcctgcttccactggatcgcctcggcccaggaaccgaattgcgggatgacgatggcactcgcgctcgcagcgaccgagctcgccgtcgccgtcgccgtcgcgaccgccgacgacaggagctctgtcgaggcctcgagcatgccgccgccgccgttgccgctgccgccgaagaggctgccaaagccgctgccgaagccggcgtccgactcatccgggtcaatcatgccggtgtcgcggatctcttgcgcgcgattccggaggtagaggccgtactggatgagggtgacgccgaggccggcgcgcgagccgtactttgacgagtgcgtcgtgtggaggacgtaagtgaggaggaagccaacaaactggaacgacatcgacacgagcaggttccagccgaagccgaaaaagttgccaacgggcaggccgtcgatcagaaggtcgtcacccgagccggtgatggcgccgagcgggccgaacgacggggcgacaacgttgtgctcccagtagggcgggacggcatcccgcgcagcgacgttgtacgccggcggtgcgtccttggacgcaaactcggccatcatcgacaggttgtcgccgtcgccgctgccgtcgccaccgccgaccatgtcctcactctcgagctcgggcttggccgtcaggttggcgaagacgccgtcggacccgcggggcgaaggcgcggccgctcgcgtgaagtgcgtcggcaggagcgagcggatgaagcgcgagggcgctgagggtgccgacgggtaggctggcgtcgttgtcagaggcgtcggcccggtcggagcatagttttcggggtacgctcctggcggcggtgagccgggaggcgggaggaactgccaagggcggaggggtgggagcgagctcgcgtcagctcgctttggccatcgatgggcccgaccaagctcggacgaccagccgatggggaggctcgtgcagcgcaagactcacatagtcgcgatcaaagtcgtacgtcggctctgcatcggtcgactggagcgtcgtggcaggcagcgttgacggccggcgtaagggatcgtcgacgccatccgccggcggcgacgacgacgacgctgacacagcgcggccggcagccgcacgactgtcctcgtcgggcaggccggcatcgtctccggcatcccagacgagattatggccagtccgggcctgggagagcggcaggttctcatcatcgtccgagtagtcatccgagtcgtcaaaggcggcttccatctcgcgctgccggctcggttggctgttgctggtcgacgagcccgagcggtggtggggcggcggccgcggcggatacgacggcgtcggcgcgacgggcgtatagcgcgacatcgagcaggggcgcttgtgcggcttgcaggtcccgcgaggtttgatccgagagaccgaggagtaggttggtcgaaagcgaggaggtcggaagaggagagggcgtcgcggtcttgctcgtcgaaggtcgcggtggaacgaggcgacctgcggccgcgcggcggccggagactcgggcgacaactgcgcagcagccaacctgtcgaccgaacgtcgtcttctcctgacggtcgacctggtcactcctaggtagcagcctggcagacaaacttgtcaaggtgcctctgattttcctgaagccgatcagaaaggccggtcgcaatttccttatcagcctcgtggcgggcacccctgtcgtcctcgcccctgtcggctcctgacgccgccggccacgaggctgacccaaagggagtccaacgccctcttttccatcgatgggtgagatctcctatcgacactgagggacatataaggcgtcccaagggagtcgctggcggctctcttcttaacccccatcctcctccctcctcccgcctcaaccacccgctttgatgctccccctcttggcgctggccgcacttccactcgcagccctcgcagaccagacttgcacgcttcgcgccgcttctccatggaccctgaccaaagaagctgtgcgtctctgctgccatcgcctgccaggtagcccccagtccgggcagctcttgactaactcgactctcgttcatcatagcacggggccgactttttcgccgactggaactttttcacgctcgacgacccgaccgagggcacggtcgactacgtctcgcgcgaggtcgcttttgctgaaggcctggccgtgagttatcttttcctgtcgtcaaactcgtttgtgctgacgtcgacccatttcaattacaggccgtcacgcccgagggcaaagctttcatgatggtcgacacgacgcagaccatcgatgacggcgctcgtggccgcaagtcggtccgaatcgagtcgaagtggaagttagtcgagcggcttgcctgcgtctgctttgaccaatggagactgatctcgactgacaacctggtctcgtgcaggttcaactcggactcgctgctgatcgctgacatcgctcacttgccgaccggctgcgggacctggcctgcgttctggtgcgttgcctcccttgttcaaaacgcgcacagggcccgacaagctcaccaacgttctctttttgcaggacactcggcaccggccctcacccatctgtcggcgaggtcgacattgtcgagggcgtcaacaactttacgatcgacaccgtctcgctccatgtaggcaaagaatgcagcatgccagccgaatttggcgcaagcggcgtcatggagaacgatattgactgcaacctgcacacgggcgacggctcgggctgcggcgaaaccgactacggcgacaagccaacctagtgaatgcgagcggcttccgtacctagtccggtccctactgacttgctccctccctctagcggcaagcccttcaacgaccttgacggcggcgtctatgcgagtacgtgaaacgggcctttatcgctgcgccggtgccttgctgacctcctgccaacctcgaccagtgctctgggacgagacggccgtctccgtctacttctttacccgcgctacgatcccagcagacatcacctcgtcagcccctgcaccctccaaggcttggggaatgccgattgcgagattcccgagcacgtcgtgcgacctcaacgctgtcctggttgaccattttccaatcttcaatacggcacttgtgagtgcccagcgctccttcctttctgcgtgcccctcactgaactctccgacgtcatagtgtggctcgtgggcgggcaaccctgacgtttgggcagcaggctcgacgggcagggccgacggcgcgccaagctgcaaggcgctgaccggcttcgctacgtgcgctgagtacgtccgccagcgcggtcaggacttcagcgacgccttctgggaagtgagtcaatctttccctgccgatcccgaaagctgtgtcactgaccctgctccgactagatcaactacctccgtctgttctcaaagtgagggcgacgggcgcgagacgagactggggctggtccccggtctacgagtcgatgacgatgagtttctctttgcccactcgtgtgcgagcagagagggagtcgtgcaggggtcatcgcattcgttaaaggggagtagagaggggcaagggaggctcagcgcagcgagggagtccctgctctgctgccgttcgccgagttgtcgagccggcggacggcgtcgctctcggcccgcctctgttgcgcctttgtgtagatggggcctgcgcttgggccgatcgcgatcccgtgccgggccaccttgttgagaatggcagcgagccgtcttggctggacgacggctgacgatcggcggaaggtgggctggttgaggaaggacttgacagagtctgagaggatgatcgtaatcgtctgcacgcggaagatcgtcgagaagagagacgtcagtgatgatctctccacagagtctgctggcaggcaggcgcaccagcttgagctcgtcaaagacggcgccaagctcgggcttgcccatcttggccatctcggcctcgatgtaggtcgcgtccgacttgaagtcgcagagcccgttctcgttgacggccggcacgtcatcgccctcgagccagtcctgtcggtcgaaagcgagaggtcagtactggaaacaggcgaaggcagagaaaagaaggggtcgcaccatccacgtcgccgcgatatgctggcaggcgctccgccagatggagccttggcggccggcctcgagcccgctcaggccctcgccgacgaagttcttgagaaactcgaccatgtcgacgaggtagccgctcggctcgcccggcggccgccgtgtcggcggcgtccactcaatctcggccagctcaaagaactgatcgagtttggacgagatgatctttgagatccgggcctgggcggcgacgagcgttctgttgaaggcgccgatcgaggccaacttgagtggtggtgcgctcatgtcgtgccgaatattggcgagcgagccctcaagcttctcggctgcgaggcggaagaactccatgttgacgacgagctgggcaatctgcgtcaggttgccgatgccgacgagcatatgcgccatcgtctgcgcaatgtgcttcgacagcagctcatcaagcgactgcacagcaaggccagcgtcgaggtcggttgaacgtcagcgtccgagaaggggatggcctcggcgagcgggacgggtctcttacgttggccagcagcgcatccgaggccgacgtgttcggaacgccttcaatgaacgagtagaagccgtcgacgaaactccgaatgtcgatgcacgccatcgcgtaagcttgcgagaagggcatcgtaaccggaaaggagcgcctgcgacggagcggcaaaggatggggtcagatcaagaggtcgccggttgccccaccggatgcaggctcacttctgcagccgctgagcaaagccgttcggcatccagcagatcttaagcacccggtcaaggtcctcgggcccgtcaataaccatcggctggaggtcgtcgcgctctacggtctgctcaaaagcacacatgcttgtcagtcaagggcgtcaggccgcactttgaacagaaagaatactcaccgaagccagcgtcgagctgtactgcgactgcaacagaatcaggtacttctcgaagagcgtgacgaggaggtcattgagctgatcgggcacgaagccgtggatctgaggcaaggttcaagcaagtgcaggtcagcaaaagatcgatccaagcactggagcacacaaaagacggacctcgagcgcctggacaaacatgccgatgccagccttgaccccccgccagacctccatctctttgcaaccctcgagcccaccgcggacggtgtccttgacgcggctgcccatctccaaccagagcgcttcgacgtcctcgcggcgacgaaagctcgagccgccgggcgaggtagctgccgtcgtctggaggacatgcgactcgacaaggaagaagccgagcagctgctctagcagcgttggcagcgtctggagcagcgtgtcggccgacaggcgcgtatgcgacgagagaatgaggctcgcttgggtctgcaggcacataactcgtcagcggccgttgggcgtgcgagcatggtggctcagaagatgacaaacacgtactcgtcgatctgcctggtaggtcgcctgcagctcgggcagggcgttgagtgccgtgtagatgtggacgcactcgtacagcggcttaaagtcgatcttgatctgatcgttgttaaagatgtcgactgttagatgaggcaaggcgtcagaggatcatccaagggcatcagggaactgcggctggacgcacactcgttcttctcgttgatgctctcctcaacggcactgccgacgccgcctgcgcccttgccgccagcgccgacgacatcgcggtccctcctcgcccgccatcgcctctcgcgccgccgcatctcgtccgtcgcaagccggccgagaagaccagatgactggcggatgtcaaagagccaggtcttgagcgacgacgtgaccttcgacttgagcgtctgccggagcagcggcaaacgcgactggatgtgggcgtagagtggcgtcgtcgacagcgtcgaagagacggggtagtgcgtgaggttatcgagtgactgtcaaggggggacagcggagagtaagcgagtgagctcgacgtgttgcaggtacaggccttcgcgagctcaggacgcacgcgcagggccgaccagcttttgccgctctcgatcaggctgctgacgcgctggacgccttcgagcagctccataacccctcggagagcatcgacgccctcgtcgacccgctcgcggacggcccgctcctcgaccgcccggcgcttcttctcgagcagcgctcggccgacctcgcccatctgagcatcgagctcggcgatccggtgccggagatggacggtcccctgccggacgtcgagcaggttcgagacagaggacgtaaagtcgaggtagttctcggtgcagaggctctcgatcgccgcctcctggtcggcgacaaaggtcgagagcgaccggaggaacagcgccgtcgactgcgtctggtgcagctgcttgagcagcgggtgcagcggctcaaagttttcgaccgaggtcgctaccgcccggtccgagctcaaggaagcggctgtcgtatcggcgagcgtgatctacggttcggagagggggtatggagtcgtgtcagcgcggcgaggcgctgccggagagagctgggcaggccgagctctgagcgagcggagccgaatggcggcaaggacgtacgtcggccagcatctgttcgatctcgacattcgagaagtgcgtcttgcgcttgggcgccatcttgggagccggcctctcgatgctagcccagcgtagggcagctgcaggtggaaagagaaggggcgagagggggcttgcgatggtcgacggcagggaggagagcaaggcagccccgcgcgtctcccaagacgcgtctccccgaacccgccctcacgacctgtcaacgttaagctcgagcccgctgagatacactatcacaaacgacgaaaggagaccgcagggcacggtcactagcgcggcattttgtccgcttcggcacgaaacgacgtccttgatcactcagttttggcagacgggcattcatttcacgacccgctgagaccgacgagccgcacgcatcgcgtcgctcgacggcacagccagcagttgtcgcgatcccggtattgggccaccgccgtcgcagggcctcgcccgcaacgggatcgcatgacgcttcgtaagaccaaaagtcgccgagcccgtaaacggtaagctgcttgcgttcagcgagagcgatggcagcctgtaagagcaacgtcagctgaggctccgaacgagcgtcaagttcagtgagctcggacgtacgtcacaggggaagcttgtgaactgcagaagcgctggtgggcgtcgccggcctgcgactggcgaccacgaggatgaggtcggagtctagccggcgttgactgaacgttgccgcgtctgacgtccttcgagttggccagagcagcctgcaagaatgcgtggctcgacgactcgaatggtcgacgagtgccgctggaggtcgggccgacagcccagaagactcggcgcgtcgctgtcgttggtttagcagctcagtccttcttgaccgacccagcgaggccagcagtgctggcagcgtccttggcctccttctccttggcgctctcgagctccatccgctcgagattgtaggcgacgttgcggttgtagtgctcaaagagccgggcggcgacgatgatgtcctgcgcgccttcggtgtcgagcgtgtcctgcgggacgcgagtcggtgaagggggggcgagcgtcaggtcagcctacatccagagttcgcactgcttcaagcacggcagccgcagcaggctgagcgggagagcggggacgcaccgatagatggccgttgagcgccttcatggcctcgttgcatttctcgaccgtcttgatgatgcgcgtcagcaggagcgcctgcgtctcctggtgcgggttgtccatcggagcgggtggggatgcgaggactcgagacagagaatctgttatcggcaagcgagagagcgagcgagcgagcgagcgaggtcgggttaaaggacgagcggcgagggctgaaggaggtcgaggtaggaggagagccggcgacgcgtcccttttcgtcgaggacgcgtttcgggcgtcggccgtctggctcgtctgcagctcgcctcaacgacgcaccaagggcgctccagtcggcctgacatgacaaagtgcactttcatcgaagactgcctctcaggaagctttacgcgggcaacacaggccgcgaaggagggtctggtcttgcgcgctcagcccaccgcaatggcgcagtcgggcggtcgccaagctggacgacggttccaatgacaaggtcggcaggcccttgacggagcggagaacaacaactcatccaacaaaggaggctggctgtcgagtgtctggggtcggcaggctgcagctgaataggacgttggactaggttggcggctgggtcgaaggcgaagcttgttcgacctctgcctccgctgcaccgcccacagccgtttgccgtggggacgacgaaatgagactcgcaacgagcgaagacgagattttcttgggagcgcaaggcacattgttatcgcggtcgcggtgttgtcttgactgacacgaagaccggaggaggacaaggacgacgggagcagcagcagctggcggcttgccctgtccggcgtcatcttgggtattgttgggctcttccccgatctgcgcccgctctggagattccttgccggcagattgagggagcgacaacgacgacgctgttcgacggcctccgtccatgctacagcaccctttcctcctcgtcagagcttcagccagcttgccgggttgcgccgctcgctccctcaccttacgtccatggctcgctgtgtcgctgacgcgctgctggacgagcgacctgctggtcatcgcagacccgacgcaagggcgatcgcagccggtcgcttcatcgctctgcgacacgcacaggtctcaccggccgacttcgctgctcgcgcttgcttcgcaacccctttgggccgtgcccccattccttcccccgcaaggccggcggcggtagaggcacaactcccggcgaccgcggcccctatcgtatccctcccagatcggctgcgattcaggccgcttcggtcggttgagctggtcgtcctcgacggagggccctctcgagcagctggctctcgcaaatgtaccattcgctcctctgctcggcctgcacggtcggctcggcaggcgcgccttctctgattgggctgctccgacgaactctgttcgttcaacaaggcgggtgggcgaaaggcagaagcctcgtcgctcgctcgtcctagcggcagctttcgtcgctagctccggttgcccctttgctctcagcggattccgacgcggtctcaaccgtctgtcgctcgctccaccgccggcccacggccatgaccttgtcctgcctgcatcaagaaggttacttaatctccttgcggctctgatccctcgtgctggccacgagtgaagctcgcactcaagcttcggcaaggaaagtccgtcgtcggtcgatgcccggtcattcactctatgccgcagccttcaagagcgctcgtcgaaagggcttcttccttccaccttcttcccctccatccgccgctcccaccactgccctctctccctccctcatcgctacgtcgctcgacgtcgatcctccgaggctcacctctcgctcctcggtcaagctcaaccacccgaccggcattcagcatccggacctccactctccctccccactctacgaccattcaagcgacacgacatcatgccctcctcgaccgcgctcctcatttcggcccttgcgcttgcctcgcaggcgcaggccttcttcatcctcgaccacgcaccactcgtccggacccggctcgacccgatcgtgaaccccggcggcatctcgtcgcacgtccacaatgtcgtcggcggctcgcgtttcggcaaggattacagctacgatgacctctcccagtcgcgctgcacgacggccgccgtctcggttgacaaggtgcgccgacgcttcgcaagggatgtcgcgacgctgagctaaccttgattgctgtccttccattcgtccgcagtcgaactactgggctcctcaactctactactacgagccggtccagcagacatatcgcgccatgggttcctacgcacggacgtagtaagtcccgctgccgctgctgctgtcgccgtctcatgctcgtgctgactgtttgacctccccgatcgccgcacagctacctcgagcggcccggcaacaagaacgagaagatccacgcgttccccaagggcctcaggatgcttgccggcaacccaaaccggcggacgtacgacccttcgtcctttgccgaccaggccatctctttcgtctgcctcgactactacaactcgcaccagggcgacccaaattgggagcagcggcccgactttttcccgcaaaactgcccggacggcatgcgcgcgcagctcttcttcccctcctgcgtgcgtcgatctcgcctgtctgtcatgcagagatgccagcccgactgacgacaagccgtactactcctctacagtgggacggcgtcaaccttgattcacccgaccacaagtcgcacatggcctacccggtcgacaactttcagggcggcaattgccctgcgagccacccggtccacctcgtctcgctcttctacgagtttgtcagtcaccccgccattgccatcctttcacggtcgccagagctgacttcattctctgcgcagatcttcttcaccggcgaccacccgttcaacgcgcctggtaccccgacctgggtctttgctaacggtgacacgaccggcctgagcttccacgccgacttcacgaatggttcgtccgcgcgccaccgtcgccatcctcggccttcaactgacccctcaaccatttcaccttcaggctgggacacggacgtcctccaggctgccatcgacacttgcggcatcgagaccggcggaaacattgacgcctgccctgcgctcaagcccttcatcgactatggcgccgcctcggcctgccagattgagggccagatcgtcaacgaggatgtcggcttcaacgcgccgatcgcctcgcttcccggcaacaacccgctctggtcgacaacgacgcccaagccctcgaacccgagctacaacgagacggccgagtacaccggcgccggctcgacccttccggagggttggagcacggtcggctgcatgtcgcaggcggccggcaaggtcctttctgcgatcggttactcttccgacagcatgacgctcgcgacctgtgccgcattctgtgcctcaaaatcgcttcccttctcaggcgtcgagtttggtgcgtcgcagccctcccagacttcattcgcacgcctcaactgacacttctgtggcccgtctcaattctaggtcgcgagtgctcgtgcgacagccgccttcgcagcggcgccgccctcgacacgctcgccctggcctcgtcgtgcaacgtccgctgcagcgggctcccgaccgagaactgcggaggtgccaaccgcatcacggtttctgtcaacccaactttcgccccgacgcagccaatcctccccgatggctgggtctacagctcgtgcctgacggagccgccgaccggccgtgctctcgtcggagcaatgaccgcctcgaacacaatgaccgtcgagacctgcgttgacttcgtacgtcctgcccgagggaagcacgcagccagacttgactaacgagcccgctctttttcgccgcttccagtgctcgactaagggcttcgcttacgcgggcatcgaatggtcaagcgagtgctggtgctccaacgctatcgcggccggcgcccttaccgctcccgcggagcagtgttcgaacacctgcgcgggcaacttgcgccagacttgtggcggcagccagcggctctcggtctactacaattcgatgcgaatggaatcgctctcgtcagcttctgtcgccgccgccgcctcggctagcattgccgccgccgccagcacctctcggtccctcacaatctcggtcccggccctcttctcgtcgctctttggcagcccgagtgcagcagctgcacccacttcgacgcgtgcttcggccgagcagccttcccccgtcacgtcggtcgtccccgtcaactctgctcctgcggtcgtccccgctcctcccgttgcgaccatggccatctcgacctctatttcggccaccatgacgacgtcttccagtgcggccgccaccagcagcgctgctgccgtcattcagcttgctgccggttacgaggtcttctcgacggcttgcctcgcccagaccaaccccaagctcctcatggtcaagcaggtcgccaactcgacaatgacgccgttcatctgctcctcgcactgcgcccaaaacggccttgcctacagcggcatcgagtacggtggcgagtgcggatgcagcgcgaccaagccggtcggcaacccttcgacggcctgcaccatggcgtgcaacggcgacaagtcgctccgcggctgcggaggcccctcggccgtctcggtctactactcgcccgctgtcgacgccgccgccaagctcatccttcccaccggctgggccatcaacaccgacggacctggagcctgcgctggcgaggtgtctggcggccggacgcttcctgacttcaccacctcgtcaaactcgatgaccgtcccgacttgccttaccacctgtggcgctcgcggctttaagtacgccggcctcgagtacagcgtgcgtctctcagctctcgttaaccgcgccccgtattctctgctgacgtaatgcttccattgcctcctccagtcgcagtgctggtgcagcaacacgatcgacgcccgcgccacggcctcctccgtctgcacgatgccttgctcgggctcggcttggcagatgtgcggcggcccgtctgccctcaacgtctacaagctctcggcctaggcctccttctcttctctttctcactcctagagcggagcacgtctcgtccgccggtgccttacgatcctctctcatcccgccctccccgacgcccacgactccgaacattttgctccaatcctgtccctctttgtagcactagtttccgattcttgttcatatcccctcggcccctctctgagaggcgtcactgtattctgccatgaaatcttgtcgtgaaaagggtcattatcgcaagaaggggggcctcagatcgtccatccgccgtccacctcctcgccggccttgacaaagggctcctcgagctggctcagcgtcaggtcgcagaggacgcagctcttggcgagcaggtcgtcgagctcgacccgcatcttctcgagcttggcctcagaaactgttaagccagcgtcattcttcttaccgttggccgacggtccgatcgccgacgccagagcttcgggcagaatgagcgacgagagcttgtcgccgacgagcgcgagcgggtttcggccattgctcggggccgaaagcagcgcgcgactattggccgccgaagttgccgacgacggcggatcccttccgcccgacgctgatgacgagcggacgagagcctgctggagatgaaggatgcgcctgagcgtctgagccggcgcgtactgcttgagctgcaaagatagaggaggagggaagcgtcggtcagtctttgcttggttgtgctcagtccatggccacataccagggtgatgaggcagtctgcccggaacttgtggccgcaaggaaaaacgtagaaggggccgcccatcaggccgcggccgcatcggtcgcagcggtcgtcggtgttgacgagcacgaagcgccgctcgaggtcctttatttcggtcttgatgagctcggccgacgccgtcgtctcgtccatctcggccttgaggctctggatctgggccgcgcacgactcgagcgccgagcagatctcgaccttgacgtcgtcgatgacaacaaagtcggggaagaacgagagaatgtcttcgattgcgaagtttgaagactcgagcagcttcatcgcgctgataagaggatggatttgggcggatcagctctgttgcccgatgtgagtctcggagccgacggggagcctttgggacgcacgtcttgatatccttgcgctcctggacgacaaacttggcaatccgcagccaaagcgccttcttcagcacctcgtcgtcctcgacccggtcggcgcttcgcttagcgccctcgacgtcaccgtgctcgagtgcgagctcgaccgcgctctcgttctggcccatgcggtcgtaaatgatcagacacgcttggggccgcgagtggcaaaggcggagcgcaaagtcgaggtcgtagaacggtcgctccgtctgctcgtcgtgcgggctcttggcgagaaagtcgagcagcggctggtcgtcggccgaggaaaccgaggacgtgtagagggtgatgagcaggttgtggatcatcgaatcgctgttgctctggctgaagatgatgtgctggaggtagcggatcgcatgtcgggcgctcgatgtcgtcccggacgaggtcgatggcgagtgctgcaggttggcatgctgctggaggagcgccgggatgagccgcctaggtgagagcgccgagaagcggagccacgagtcgaccgtcttctctggtgcgttgtgcataagcacgctcgagaagcgatggtagagctcggggtcgctctggatagacagaacaaggcgagagggtgcgcagtctgtcaatactctgcttgaagtttcgcatgacaggacagagtccgcacctggcgactcaagaccgaaatggcctcgtcccagttctcctcgagcacccagtactcgacgacgcgcgcaaagtccttgctcttgagcgcaaagtcgatgtagaggtcggcccgcccatgactgagaaagaggtcgtacgttgtctgcttgtcgaggtcctcctgattgacggtacggcagctggatcagaatcacgggttgcgatgtgtcgggacgagcgacggccggacgcacgaggtagtcggagaggaagccgcgcagctcctcctcgaccatgctccgctcgagctgcaggctctcggcatccggcgagcccgccatggctgctgcgactaaaagatgagcggtaagcgtcgtcaaggtcagtccatatgctgcatcagggcggcgaatccgctttgttagggtctcccagagggacggaccatcttcgagcgagttgagcttggaaaggttcatctccacaagccaggtcgcgagcatcaagcgctgcgtcctctcctgtgatcatatgaggccacgtctgggtcagcgtcgctcagaacatgcgcgggtgagatgtcgctgagagcagagcattgtaaagctctcctaggaagccgacaggaagctgcggtcgagttggcgacgtaccgtctttggcagcccgtcgaacttggcgttgaggtagaatcggagggcgtccttttcgtcgacgtcgacaaacttaaagacgacctcctcgagcgacgttgtcgagctcggcgccgcatactgctgggcggcgaggtggtagcggccgagcgagaacgactggtcggccggagagagcgtctgacagcggcgatggggttggcaggaaggccgtcagcccatcaagctcgtgctttgcaaggacgtcttcgcaagccctacgtacggctacttcagccatgctattcagtcgggcaccggtgacccgcttgggaaggcaaagtggacggggtgattgtccaaggtcgagcagctgccatcgcgcacctcatcctcgcccgcgtcaggcgcgcgtttcgtcacaagcgttcgcacggaggcgtgcgcttcggcctctctaaatctccagtcgcagctgtcgggtaggcatcgcgatggtctgaaggtggccctgaactgcatgctctctcgactggacgcgcaaagaaaggtggccagggtcatgtctgcggcacattgtgctcctcgtccgtcgacccactcgacaaccaggccctccatcccgccttcgtcggccgagcgctcgtctgttcggcctgcaacgcacaagcgtcgagctcggctgccatcgcccatgcctcgagtgtccggcgcgtctcgtcctcgtcctgccggacgcgctcgatcgacgtcggcaggatgctctcgagcagctcgccttcgacgccgagcagcgcctccttcttggccagctcgcgtgcggcgtctcgggcagcatacgagaagaaaaagccgtgcgtgccgccggcaagcacggcgaagagtgcaaaacgccggatgacgggcggaaaccagcgatctggcggaaggtgttgcgggcagccgtcagctcagagcccttcacaagattgtacaagcagcagaacacgcactgtagagaccaccagtcgtgatcataagccctccggcaatggctcccccgccggccatgcggaggtcgcttcgcaactcctcctcgcgcgtctgaccgagagctccgcctggcatggcagtggcgtcgggctttgcccagaagtcggccccccaccactcttgcgcaccggcctcggtcttgcgcgagtgcctccagcgctcgttgaggagcaggacgtgctcagctgcggcctcgagcaggatgaacgacgtcgtgaacgcgcagtagcggccggcggtccggagcccggccgccataccggcggtgaagacggcgtagttcttttgctgcagggagcgagtcacagtgttggatgtcagatctcccagtccaggtctgagagggcttcagggaggtgagagacgaaccttgcggtacgtgtaccagccggccttcgtgcccggcttccggtggctgttctcggccgtccagcgaagacttctcgtctggcggcccttgatgaagccggttaggaggcccgacgccccagcaataataagcacgttgggcagtctgccgagccactcgtcaagcaacggcggcggctgccagaagcgacgctgcttcggcagggggatcggaggggagagcggcagcggcggccggaccttgtcgagcgagcgctcagtggggtcgtcgacctcgcgctccgatttggcccacggcaggtagaacggcgcgcccatcgaggaggagcgagctgtctgtcgagtctcggctttaggccagagtcgaagatggaggttgggagggagacaagaggcgagagtgacggccattcaagccgcagcgcctgagcgtcgctccttgcccctgcaacggccacctcggccatcttcgaccctcttctcctcttcctatcgtctctcgcagcgctcatgtcgtctcctacgctcccgagatccatcttcccgctcccgcggacctcgacctggggccagtgggccaacgtctacctcgcccagggcctgattgcgggcctgatcgacggcaccctcaactacttgatcggtgtgtcggtctcgagctcctcctgaggcctttgctgctgccgctgacgagcttccgcagctcgcaacatgtacggcctgcacgagtcgtccttctggatgttccctttgccgttcgccggcgacctcggcgtcacgtgcctcgtccaaggcctggcgacgtacctcatcgtgccctcgctcgtcctgctcgacgtccgcggcaagcgggcgactggtctcgtcgatccctggccccggccgctggagcccgaagccaaggccggctcggtcgtcaacacggtcggcagctgggtgctcgaggaccagggtggccagggcgtcctcctcatcccttgggacctcgctgttgcttggagggccggcgagctcaagagtctcaaagcgggcgacgttgccaagcggatcggtctccgagtcgtcggtcaggtcattaagggagcgctctggggagcggctctcttcttcctcttctggtgcgtctcccctgccagaccactgccctgctttcgaggagctgatgacgcccgctctcggctgcacgaccggctttccccttccaggcctctgagcgtcgccatcctcgcccccttgtacacgcattaccctatgaccgcgcccgagcccgaggtgcgcctccgcctggctgagcttccccctgagcgaccggctcggctgacgtcgtccgcctgcgtcgtgctgctgcgcgtcctctcctctgcgttccgccaggtctacaagttcgtcttcacttttgtcatcggcttctttcaaaactacctcgtctgcctgcaaacgctcggcagccctgtcgccgtctacggccgcggttacgccagcgtccacgccgggtacacgggcgccggcgccgaggacctcgtcgacagcgagcgccagggtctcctcggcagtgcggcagcctgagccggcgcgcgacgaaccaatgacggccacctgacaaaatgccgagcaatcctgcactttgatgcgcatatttgatcgtaagagagtatcggtggaaagctgatccggtatgcaatggtcgtctacaagtcggagcgggctttgaagaggggaggcgctcacgaagccggcgcaggtaggaggggtcgaggtctcagtattgtgggcggacgtccggtgccggtggcgccaaactcgatgagccgagcatgaactgggcagcgaggccgtcccactcgatattgtcgtacgtgtcatgttcagacgacatgaagccgttcttttcggcgcgcgactggacgtcagaatgggatgtcggtcgaatcgcaaggccgcaaatggaacagactcacaaactgcgcaatcgagttgtagtcaaaggcctctgtcgggtcgtttggcgagagcgagcttgacgaaccgaagtccatcggcagcgggaactggcgaagggaggtgctctcaaatgtgagccgacgtgacagagagaaaaggttgtgagacgcccgcagtacttgcctggaggcttgcactggccttggccgcgtcggcagggaggacgtcgttgaaccaggacatagtgtctgagagcgaggcgagatcgctgtccgagatcggtatcagcccagcggttgcagccaggtcaacattcgaatcgggcgagggttcgccgttggacgagccggaagcatcgacgaggtgcgagatcgagacgccgcgccgttttttgcccttgagcgatttgacgaggcgggtcgtccagccgagcagggcgaggtggtcctgatcctcctctttgcgtgcctcgtcggccgcgtcggcacttgcgggtggggcgccaaagatgctggccatggcaggaaagtggtctccaccgccgggcaggtgggcgtcggccgactctgccgccatgcgctctttgccgcgctcgagaaacttgatgagcgccggcagcgtcgaccgcggccgcgagccctcgggcgccgaagcaaatagcgagatgatcgcctcgagttcgtagagagcaaaggtcgcaaatgggcacctcggagccaggatcgtgatcgtgctcatgcagacggcagcctatgtagattgaacgagatcagccgatgacacgcaacagcgatcacgcgacgcaggacgcacagtaaaagtttgataagagaagaaccattgacgttgggagaaggctggatagagcgtgcttatcgactggttgatgcggattgtgacctggggattactcgaggtcaggccgtggtcggtaaggtgaaggagctgacggcaaggacccacaatgcagcgctcaaagacggcgagaaagctcgaggcatacttgctctggcacgggttgagcggagactcgtacagggctttggtaaagtacggccgctggagaaagagcacggcgtcggcaatgttgagcgcaagtacgtgccgctgcgccgtcagccgcaggtcgtgcttgtccgtcgacggcgaggtcttgacggcctcctcaggcgagccgctgatcgagatgagggcctcccacgcagggcggcatcgccaatggaagggtaggttcttttcgaactcgacgctgcggaaagcagtcgatcgaagagtcagccgatagacgggcgtgtgaacctgtcgtcttgcacgtacatcgtgtgccagagacgggtgactgcgccgtagctggtcggtgggttgatctgcatcagcttcgagagatggctggtcaagcacgacagagttgaagcttttgtcagccttcagcgcgtatgtctctgactggcaacgaggagctcacccgttaacgagcgtcgcgaggcgaaacttgagggtcgagaagccgacctcgatgccagcctcaacagcgtcggcgtcgaccgggaaaagggtgtcgtacgtgccgacggggagcgtgcttggccgactataacacgcggcctgcaacaggtccgcagtctgcgactcccagaagacgagcctgcgctcgtcgttgacattgggctcgaggccccatttcgagccgtcgcggtgaagacccattgcaatgcagcaacgcatggtgatgccccagatcggccaggcgcgctcgccgcccgactgtgggctcgtcgtcctgcggatccgagaaggtcgtcagcttggccgacagatctgggcttcgtcaagcagagactgacaggaggtagtggcccatgatgtgctgggcgaaaggagagccgcgagagcgaagagatcagctgggcctgaaagagagcgacaatgccagcacaagctcttctacacaccagtgcttggcaggcggctagggtcggcttctgcatgaactggccgagcgtcaggcagcactgagcgaggccgtgatagtgatcgctgattgggtctgtcggcgacagctcgaggctgaattggcagccggtggcaaggacctgaaacacgagtgcgaggcggtgtgggtgaaggtcggctgagcgagagggcgagcgggcggccaacgcggcgtagacggcattgacgtgctcgtcgaaggacgagcggcggatcgggtcgtagttgtaagcagagtagctgtttggatgagcgcgaggtgtcagtaccattgctcgccaagccaaccggtgcactcagacgaaccgatagtaggcctcgatgagaactcgagcctcggagcgcgagggcacctttgcgagacattcgtccagcgtgaacgcgggcggacccgtgaaagggaaggcatggcccggcgtcttccagcgatcgctgctgccgtcagggccgccctggccagaagcaacagggaatggcgtcgccatcccctcctcgcctgtcccttccagcaaccactcggagccagcgcgcggcccgatccacttgtgccggccgctctcgtctacaatgagcgtgccgaacgagcgttcgtcctcaatgtcctcgtcggagaggtgcgagacgccgagcgcagcgttctggcgagccgtgtcatccgccggccccggtggcctcggttgcgcaggggctggcagcacgttctcgacgacttgcggttgaacgacatcgagggagcgtttgcgctcgggaatcgccggcggtgccatcgcggccgagcccgtctgggacggcgcaggtccgaccgccgtgatggccggtgggcggtcgcgaaggagcgcctcgagttcggcgacgcggttctggagagcgttgaggtcggccttctcgcccttggctttgccgtcaggacaggtgtcgccgcagcctctcttcagacactggtcacaaggaactgcaggaagagggagaggaagcgaccggacgaacgtcagcttccctcgctgacttgacattgggtccgcggccgaccgaccttcgcgcgagcacttcagctgaccggtcaaggagcaggttgagtagatcagcttcagccacacgcttagaggtcgacccgctggtcgtactttcagtcgtcgacactcttgacaattgagagctacccgacgccgcttcttcggccgaggaacggcttcgacgccgtcgtcagccgcagcagggccgaccttaccgccgacgcccgggttgatcgcgccggccttgccctcgacctcgctcttgcttccggacgagctgggcttactgctgtcctgctcctgattgatggctatgccagatgcgctgctgcctggcgagcctggcggaacccaggcggtttgccgcggcggcgaccttgagctcgtcaaggaggcaaaagaggaggagccggccgaggccggagcgagcaaagggtcgacatcgtctttgcccatttctctcgttgggcgtgagaaggaaacgtcgtcgagagtcttgctaggatgggtcgggagagcagtagagagggcggcgacgaggagcagggcgaacgagagaacgccccgggacgaggcaacaagatggccccgcgggacgcgcagcatgccctgcgggtcgctctgcggccgacgtcggccggcggcccgggacaccgacactgaactgactgagagggaaccgctcgcggagaggcgctaggtagtgacacacggttcaaaaaggcatgccgactgctgaagaggcaacttgtgcgcgctgagaatagggccgctgccaggccgatgcagatgttgagcgaggcacgacgagttcgaaagaccatgagagaccagctgaagagaacgatacaagatcgaggtagtgtgagggtggcaagaggaacgagaacagagtgggctgatcacaagcaagacggcacagctctcatctactctagccccggggcaagcgtgcgcggatcaggcccagtcgtcgaccagggcgtcgtgacagcccagcggccgtcgatccgcaggtcctggccgttgaccatgccattctcgatcaggtagcgcatgccgtgaacaatctcggccgcctcagccggccggcgagggaagatggcgccgacctcgagcaggtcctggaagtagccgatccggtcgcccatcatgacgctggcggcagaggcaaacggagcgctcagtcagtcgacgaaaaggtgttacattggctacagaacgcacctcgcgacgaccgagggcgagactgaattgacgcggatgccgcacgggccgaggtagtcggccgccgccgtcgtaatgcccagaacagcggctgtgaggggatggcaacaatcaaaggtgaggaaggactctaggatggaagacgggcgactggtaagactcactcttggtgggctgcagaagcaagaccaacggagcaaaaggaggcatacgccgaccgtcagccagagcgccggtgccaccgaaaccaccttgtcagaacaaacgcacgccgtacgtcaggacccgggcgttgggcgtcgctgcggccgacgcgacgttgataatgacgccgcgctcctctgtcaccctcgcaggcaggtcgcccacctggtcggggtactgcgagttgatggcgtcggcgacgagagcattgacgatgaacgtgccgacgacgttgacgttgacgaccatcttaaagtcagcaatcgaccgcgccatcttctgcgtccagggccggctcttggacgccgccgcacagtggacgaggccggcgagcgagcccttgggcgcggccgcaagcacgccgtcgcaggcggccttgaccgagtcctcgtcggcaatgttggtctcaaagtaccaggcccggtcggctgagagcgagtcacggacgagctgctcgcctttggcttgcggcaggatgtcaaagacggcgacgagcccgccctggctgatgaggtcgcgtgccatgctgcctccgatggcgccaaggccgccggctggaggaggcgggtgtcagggagcggccgggaaaggtgtcggcgcgcgtccaccacgcactgatgatgaatgtcctcttagagatgttgaccatggcgacgaggtttagagggcacggatgggctgaggggaggagagggaagtcgggctgagtgagtcggaaagatgaagagggcacggatgggctgaggggagggttgagaggtcgtgctgagtgacggggagggagcgttgccgttagcgaggccggctggctgatctctttcaagggttggccacagaggccagaaccgtgaacatggagcccgtgccagccggcaatagtgacgatttagcttcgggccgacaggaacgggcttcgagagatggtgccggtaaagggaggcagggcggcggagagaaggactggggcgctcgacgccgcctctccctggccgcctcttaactccggtaaatccggcggcatccttgccggccgcacgaagagcccgcccgttctgacgcaaagcatgtcggtgcgctccctctgtcctttcacaaccatggccgccggacgagcgtacaccggcttgggcgactgaactgcgtgtttgggcgaagcacactgatattgccaccctgccgaaagacacgatttgttgaccaagtgggatgcgacatgaagaggagagcagccgaggcaggcaatgcaagaggagagaagcgcagctatgccggctgctgtcgcgcctagaacaaatggcataaacggtcagctcctgcctgctcatctcggtccaaggtggcggcactgactcgttgcagacggccgtctgatcgtcccagatcgatcctgctgccgtcgctctcgatcgcgaggacgagcttgtcgagcgtctgtggcgagcgccagatgatctacgtcagccagaagcctgatagctcttagtagggcggtcggtcgacaaacctcctcgaccagctcggccggcacgcccgagcacaacgcgatggccttcttgtacattgcctccttctctgcgctcaactgctcgacccgggctatccgctgctcgagcgcggcttgtgacctcgtctgccactgcttgatcttccgcgtctcgatcagcgcctggcgggcgtcgccgcaccgtttcgggtcgaccacagggtccgggccgtcgaacgtcggtgtcggaacggccgagctcggcagacgctgaaggggcttgaaagagggtcctgcttcgggaccggccgaccggcccgtccagtcaaagctggtctcctcagtcaaggcctgctggagattcttgatgcgctggccgacctggtcgaggtcccacatgcgcgactcgagcgcctgcgcccgcttgcgctcctttgcgaggtctcgcgtcgcttgaagcagctcggcctgggcggccgagaggacgacgcccttggccttcatctcggaggagaaggacgtctgcagcccgtcaaccgcgcgcttgagatctggatggcaagaagtgcagcggtggcccgggtcagcaggcgcctcaagagatcaagagccgccacctggacgcaccctcaatgacctcgttcgagttctggaccggcactgccggcgcgctcttgattgccgcgatggcgtcgtccgctgccgacaccctcagagtctgcacgagggagaggagatgtcgtcagtgagcagcctcgacgggcaaatgcaacggcccggcaagacgaccgacctcctcttcgatgccaaagtcttcggcgcggagaccgagggcgttgcgcaaactgcggtcggcgccgacgtcgacgagtaggcggacgatcgccctgttgccaacgcgggcggcgatgttgagagccgtgtcgccgctcgtgtcctggacgtcgacgagcgtccggaagccctcgccagtcgaccggcccgagtgctcgtaccgggcgacgtactcgagcacggcctccatgtagtagcgggcgacgccagcccggcccttgacgccggcgacgagcgcaatgtgatggaggatcgaccggtgctggctgtcgaccgtccggagcgtcccgccgatcgcaccctcattcagcaagagcagctccgagagcgactgggcgtcaaagacgttggtcgcaaggatgcaccgaacgagggccgtctcgccgctgtggttgccgcggtgcgggtcggcgccccggctgaggaggaaggcgacgaggttgagccgcgagagcgagcacgcccagtgcagcgccgcattgccgagatgatcgatgatcaggttcgggtcgaactgctcgtacggattcgtccagcgcgccgtcggatgaagcgggtcggggtcggacgccgagtctgcgccatcccccggcggctcaaagaacgacaagaggagagctcgctggtgcaccatatccggattcgccgctgcgtcgacaggcctcaagccgaccgtcatccgatgccgggcgccgtactgggcgggcggtgcgagctggcgatgggccgagggcgggaatgagggtgccgtcgccgagggcggattcgacgtggcgtagccgctggcctcgtcaaccctcgtgcctgggtcggatccactccgcgacgtcccgcccgattgcgagtggttgacaaaggcgagcatggcagcgtcgtgcgagtcgggcccaggcgagtggtgctggacgacgtcggccggatggctgagcgcggcgtcgtgcgacgagctgccgacgccgccgtacacttgctggtacgcctcgttcggcgggtagccgccacgatagctgtgtgccggaggctgcaggtcctgaaagtgtggagggtagccgttcatgctgagcttgcggtttgagggaggcgcctggagggagcggccggcgcgccctatagccgaatgagacgagagcaaggatgtcgagggctgtcaatgccgagcgggtcaatcgacgtcccgtggagtcatgtcagagccatgataaactcacgtgcagccaaaagaagcaaacgaggccgagacagtgctgcaggaagaccggatgggaggagaacagaaggcaggcagtggtcgaggctagaggggcggcaggaggaagacggacgcgtgcagccccaaagcgagggcgtcgtcgcatgcacgtccaggcagtacgattcgatctccactttctctcagcgacagcatcaagatcaatagatgaacgaggcaaggcatcgcgactgtcttctgcagcttggcgtcggatgagaggtctccagcgcagaacgatcggcatgagatctcgctgctattgcccggcgacctgggttgacgccagcgcctcatcctcggccctgcagagcaaccatgcctaaatggcgctgtaggcaccgggtccggccttggatccctgacgctgaccggcgtcaggacgcggggcctgtgaggccgcaccgttggaggcggcagggacgttgtagccccctggcaccgactcgccctgctcgaggtcgccaggcatcgaccagactggtgtagacgaagagcaggcagccgttagcttgattcgaccatagagtaggtagaagtggcttcaactaaacgtactgggttccgaggtcgacaggtggacgccccgggaggaaatctcgaccgatgggatcgaggcgtagaagttgtcgccgcgggtcctgagtgagccgatggtggcaaatagggtgggcgcctgtgcgaaggacaatgtcaaaccgagctcgggcatgacgtcggctcgaaatgaggacgcaccttgaggaggagggcgagcagcgagagcaggaagacgaaccagccttgccgatgcgagtggccgatcagccagacgacgtcgaggacgctgctgaaggcgagaaagccggcaaacagccgcaaagggtggtgcgtcgactggagggcgtcggcgacgacgccaaagagggcgagcgggagatctggcgacggggggcagcgcagcaggtcggatagtcagcctgcctggccatctctctggccgaggtccagctgccgtctggcttgcgcgacacatactgtagcgtggtgacttgaacagcgacaggaagagagcgagggctgcgctggccgagatgagcgcgctcgtgtcgctaagagaagcgacgaggcgacaggacgaaacagcgagcgaggtcagcacagcgagctcgaggacgataggtgccggtcgatcgaccgcctagagtgtagtcctgaccgccgaggcccgactgcgactcacaaggtcatctgggaggacatgtcgtgcgtgctgattcaacctctgcgagcgaaggaagcgagcgaatgggcgttggccaatgacgacgagcaggtgcgtcgcgccgcctccatctctccactcctcgcgcgcgagacgttctccctccagatctgacccggaggagcatcaagccgaatcaactgcagcgggtcatcttcataagcgcaacattctcgctgactgctcctcacgagcggcagccgtcgtgtgggcgaaatggagagcagatgcgcgcacggagcgccctgacgtccgaaatgcgagcatcaccgcaaccggtcgcgtctcgcaaggcaaagctctttaaggcatggtgatcaaggcaaaagcgacgtgcgatgtcctgtcaggccgcgccctccgagtggtcgtcctcgtcggcgtcgaatttgaaggagtcgccggtctcgaaacccagccgacgcacagaaggaaatttcgcgacgtccgagataagctctcgacgttgatcgatagcacgattggcttgatctcgtcgtcggcccagagctggcttgggaaagcgaacctcgaacggcaggtcggccgccatgcggatcgtgatgaggaccaggagcgcccactcggccttctcatcgcccgccattgaggggttccaaagcgagtcgccgaggcagagccacttggagacgccgagggtcaccagcagaccgaaatcttatgaggctcaaaagggcgaggatgatggatccgggagccgtcccgattccgatgttttcatcgtaaggcggaatgaggaaaagagggttgaggtcggagcggaaatgccaggagataaagatcgtcttgacaggttgaccaaagtcgagcgaagagccgttgcgcatcgagcagacgaaggtcgagaagcaaacgaagagatccagctggccatggagatggtcgacggacgtgcctggccgaaggcgccgatactcgcgaatggccgaagcgaggaagggcatcccttcgcgctcgtcgaggaacggtgacgccgccgacagactctggagagtcgggacctgtgcgagcagggcgccgaggtggatactgatgcccgagtcgagaagagctcgactatttgatgcaagaacgaggacgtctcgaagctgatcgaccgccgccggcgcctggaagaagcaagcggacagctgagcaacgagctcccagtatctcaggaccgaggctgacctgtagtctgcatcctgggcgaggtacaggccgaccgtaaggcgtttttctggataccgcggttaatgagcgtgttgtatagggcgaccgaccggacaaagcccacaaggcgagcgatcgtcgggagattgacgacagcgtagagggagaagacagtcgagaaacgcgtgcgagaccgagaggagcgcaatgccgaagcccttctcgtgctcagacactggcaggtatgagaggacgagccggatcagctcggggctgtaaaagggttgcgagcctagatgtaggagtcagtcaagcaaccctcatcctaagagcgatcaggagaagggaccgatttgcttgaccttggttgaggtcgacgattgggcgacgagtgcggtcgtgacggctgggttggctgcagcggttgcgggctccaggatgcgggacgaggtgacgccgagctcctaaagggcgtgaagaccaatacagagcatgatccagtatattttagtctggctgcataagatgaaggacgaggcaagccgaactcaccatcaataacgggtcgcctcgggccgctcgtcggcgggaggggtccgtgctgctgcgccatcctcggtcgacgaggcggccgcctccttgctgctttcgaccacgagtgtctggcgagcgagccgggtacagggaggtgagccaggggtcagctcgaggccagcatgccattgacgagacggcggggcaagggacgagggaggacgaggatgacgtaccgacgaactcgcgtcgattgaaggggcttgctggccgagttgttgctgccgccgccgccgccgccgccgccgccgccgtctgagcgtgagagcaagagctagtttaacgatgagaggacaggatcgagggccgcccgcgctgcagctgtgttctgtggcaggtctactctagcgagggcgaggtggcgagatgactgtcgagcggaagaaggggccccgactgctcggacggacgtcgcccgcgcaagccgctccgtctcgagtcgtccgtgcattcggttcacctgctgaccgccatctggaacgacagcgactatcctcttgagcagccatggtcaagccgacgattgactactcgctttatctcgtcaccggccgcgatctcctgccggccgggaaggtccgcaaccgcagcccgcctcgaggcacgcctgaggcggagacatcgcctgcagctcgcccaggactgaccaagcgtgcgtgcttctctttctaggactactacgagtcgctcgaggaggctctccagggcggcgttaccgtcgtccaggtccgcgagaaggaggccgacacgggcgagtttcttgacgtcgcgctcaagagcaaggcaatctgcgaccgcgtgagttgttcgaccgcgactttcttcctgcctcactgctgccgtcgtgtttgtcctcaggcgcagaccaggcagagatggacgggtcgcagcggtggctggctgtcgtcttctttgccctactcgagctgacgtcgtccttgtgctcctgtccggtctcctccgacgatgctgccgcctgcgcatcctaatgtcgccagtacgacgtcccgctgttcatcaacgaccggatcgacatcttcatcgccctgctcgcgctctcgccctcgccgccgccggctggcatccacattggccagaccgacctgccgctcggcctcgcccgccagctgctgacgagcgccggcgcgcccgacgccgtgattggcatctcgtgcacgaatgtcgccgaggccgtcaaagccaaagagctcgaggccgactacatcggcgtcggaccgacctactggactgggaccaaggacatcaccaagaaggtcgtcatgggcgtccgtggtgtcgaggaggtcgtgcgcgccttcggaggcccggccgttgcgatcggtgagtgcgagaacctctgtcgaccctgagcgcaagctgatcgtcggcctgtgagtcttcaggcggcatcaagcacaccaacctgcgccacgtgtgagactggctgacacagtcaggctctcgtgcgggcaggttgctgaccccttttgctctcgccgcattcctctcgaccgacagactgcacgcctcgccctctctcgcaggcgttgcggttgtttccgacattgtcggctcgctcacgccgaaggcggccgcggaacgtcttcagtcgctcatcaaatcgttcccgcagttcgcgtccgcggcgaaggctgccgatgagccgacgctcgaccgcgagggcgtcgtgcagagcacgcgagacttcctcgatgtgctgaagagggagacgccggtcgtaaacgtacgttctcatcgccggtctgtcagagcggcttcggtgctcactctcgtgagccgtgagcctctatcagcaactcactaatgtcgtcgtcgcaaacggtgcgcacgtcgacccgcggtaaagacccgtgccaacgacacattgacgcttcttctttttccgcctcagactcggccaacgcgacgctcgcgattggcgcctcgcccatcatggcgaccgtcccgtccgaggtaacgcagctatccaagatcatcggcgccctcctcatcaactttggcacgatcaaggacgtcgacggcttccttgcggccggtgcgtccctcccgcgtgtgaggctttgttgccctgtgctgacgtaactcgtttgttcggtcgcaggcactgccgccaacgccaacggcaagccggtcgtctttgacccggtcgctgtcggcgcctccgacctccggcggtcgtccgcgacaagtaagtcaagcgcagcctcattcgcgctttctcagttcagtttctgacggctcccttcgcagagctgctcgatacctggcagccgaccgtcatcaagggcaacgccggcgagattggctaccttgccggctcgaccgaggtcatctctcgcggcgtagactcggacggcggcttcaaggacccggcggcggtcgtcaaggcgctcgccctgaaagagcgtaagttaccagatcgaagacatcctcgttaacgccggcttgctgaccgcaaggtccggcgcctgcaggctgcatcgtcgtctgcaccggcgaggtcgactggataagcgacggcaagcggacagccaagctgtcaaacggccaccactatgtgcgtcgacctcttctcccgcggaacagtgatcgcggctgactcgtcccgctgctgtccttgcttagctcggcgtcatcacaggctcgggctgcatgacgggatcgatcgtagccgtgagcagcatctcgtcccgattgctcctgagaggtgctgactgctgaatgggcgctcgtagtgcttctgtgcggccgctcgccttctgcagcttgagaaggatgcggctccgacgcctggtgccttggtcgaaggcgacatgtttgccgccgccatcgcagggtgagattgatcgacgctctgcaggcgtcgctgggtcagcagctgacgtcgctcctgccttgcagcgtcctcgcaatgacggtcgccgccgaggtcgcggtcgagcggcccgaggtcaagggccccaacacgttccggagcgcgctcatcgacgagctctacaatctgacaggtgacgaggtcgccaagcgggcgaatgtcgagtttgtggcataaaaaggaagaaatttcgatccagcgttgtatcatggcagactcgcacgcgaagcgccaacctctcaagccgacagggcgcccttcagccagacgccgacctcctcaaagacactggagtgcttgctgcccgcgagcggctcctcgagctcaaacgcgtgctcctcgttcggcaaaatgatcaggcgagcggcgtctcctgctcctgcggcctgcagcgctcggaagacggttttggactcagagaccggaacgagggtgtcgcccgagccgtggatgaggagcgacagcaggctgtcctgcggcgggtttgacgccgagaggggtgagattcgctcacggtccgcatctgacaggcccgggttcgtctccgagactggcgaggtcgagccagtggcccagacgttgcgcatcgtcccgtcttggctgcgagcaggtaagaggggcttagccttgcgaggtctgcggcaaaatgtcaagcaagcgcggcgcacatgaagaggtcgtaaagcatgcctcggtagccctgaccgccttcccgctcaaggtagagcttctcagcgaggcctaatccgaaaccgtcgccgcctgtcacgaccggctgctcgctgacgcgggcatggacggcccggctgacgctccaaaagtcagcctgcctgggcagcggatcgaatgctgccgtcgaggtgcgcggcgtcgagtaaaagggcgacgtgaacggcgagacaaccgggtagaggaggaggagcgccctgggccgaggcagatgccgagcgatctgggtcgggacgagcatcgccaggaggcctcctgcatgacagggccgagtgtccccgtcagcgcctcgaaggatcgctcagcagttccaggacgcacctgccgagaagcctgcgaccatgactctcgccgggtccagctcgctcgccatcggtcccgacccgccaaacgcccaatcgtacgcggcgagcacgtcgtcgaggcagccgtcagcggcgccgccaccccgactgacgagcagccggtagtcgggcgagacgagtgcgtagccctcgcgggcggcgagatcaatcagccagggcgcgatcaggctcttgtcgtagctgacgaggccgcctgtgcgacgccgggtattggtcagcgaggaggaaatgaggggcaggcttcgctgcggtcgaacgcaccggggtggatggcgaagatcgtcggaagtttgcctgcaggtctacgccgagggaagtacacgtcgaacttgaggcctgagaagggtacgacgtgcgtctggacgtccatgtgggtggctggagacggtgatgggacagtgatgggacggtgagatggccggagctcgccgcgcggtttgggacgaggtcggtgcgagctgggccgggtggacgtccacgagcaggcgcctgacagggtaggagaaggtgcaggagagctgttgaggtgagctattggctggcagtagtgcgtgataggtcgacgtcgacgagaggccgaggagcagcagcagagccaggcactaccggtcggctccgagcgtggcttcggtcccggtcgtccgacgagcagttcgcgagcgacagcgagcaccagccctctctgccttcgtccctgccgccttcctcaagctccccgccgattcgccaaagcaccctctcctcccctcaaccctctctctcgcccctctcgtctccttccgctgtctcgctttccctgtagccttcgcgaatgtgcttctccgtaattcgtcctcgtacgcctcgcactgcgcgccgccgccgtcagtcgccgccgacgccggtcgagctcgcctgttcgcaacctccctctatcttgaccttcacccagggatcatgagagattacagcgcgtccaaacagagtacaggcacaacgagaagcaggcacaggcgatacaagtttcgagtagatggcgagattttgagaacaggatggggggtgtgggtgagagaaggcacgtcagggagcgacctcgcgcgttgacgacttctcgcttgagtcgaagcgggtcggggttggggcgtcgctaaactccctgtgttcgatctcggcgagattcttgttcttgaagacggcggtcgagcggtggctaattccccggccggagacgagcgaaaagaggatgtcgtgcaggcggcggttgtcctcgtggttcgagttgtctccgaaaaccgtatccatttcttcgagtctcacccctttcgtctcaacgacgacgaagtagttgaagaggatgctgaggaacgagaaggcggcaaagaaaatgaaggtaccgtctaagggtaggcaaggctgcgtcagcacaacacttcaacagagagcgccgaggccgggacgacacacagttggttttctcgatcaggatgggcgtgatctgagacaggcagaaggcggtcagcatggcactgtgagaggcattagctcagacaactcacgagaccgatctgtgattgcgtcagagggtcgagtcagcgcggtgtcgagagggtcgtgcggacgattccgaagcagtacggacaataaagttgaaaatccagcaggtgacggtcgagagggcgacgcctttggagcggaaggtcgaaggcatgacctccgggggcatgcaccaggggatgggggaccagctcgtgccaaagatgaacctgtgttgggtgcgccgaagcgatcagcattctgcgaagccttcgcaagtgtgagagagagtcgctgtatccgaggactggcgcagaagtcgttgcggctcaacttacatgctgttttggcagaaggggggggagctagttagcgatgagcgcaaaagatagatggcggtgtcggtcggcactgacaagatcatgatcatggcgacgcctgcgttggcagcctgaggagcagcaggccaattgtccgagtagacgccgatgagagcggcgatgaccgtgtgggcgctagagagccgaaggcgcctcggatcagcggccgaatcaaggaaacgaggacgaggggaccgactcacgcaaagcagcagatcgagccgaagtaaaggagcttttttcggccgacgcggtcgataatcatcatcgcaacgccgacgccaatcacctgtagcggtcagggtcaaaattaaagtgagggttaggatcaggacaagacttgagcaggcttgcagaaggaccgggctcgcctgcatgacgttggctattccggagtaaatgagctgggtctcacgtgcgactgacagtgagataggtgtttcgtcagttaaactctgtgcgaccgttggctgtcatgtctgacagcgcgacgcacatccgagagcctggaagagcagtctggagaggaaggagatcagtcagcgtcaggcacgagtagatcgagccgtcgactacctgtacaactcacgggctgtaatagatgactgcattgacaccgattgtctgctggaacatcatcaggcctacgccaatgatggttcgccgccaaactttgggtccccagcagtccttccatccaagtgcttccgccttgagcgaatcgggcttgacaccggggtgtcggagctgtgtagcaagcctctcgttctcgactgaagtttggcgacaggcggtgatggtcagcagatagcgcagaagagtaaaacgaaccaaagcagggagggatgcaccatcgccacggatcgagacccactcggcgacgaccttgggatcgttttctggcagctggcggagccgagcgagcgagttgagcgcctcgcgagagcggccctttgagcagagccagcgcgggctgaaaggcattgccatgaaaaggaagcagaggacgacggcaggctgcagcagacaacaggcggccgagccgagggtcaggagagttgctaagaaggtcagaagcgctaagcaaaagagagggacgcaccaccatctgcaggaggaaaggcagtcggaacgaccagtcggaggggatgttgcggcagccgtacgagacaaagaaagcgacgacaagccctgtgcagatcattaagctctcaaacgtgagcagcaggccgcggagatgaggaggagcgacctcgctggatcgtcaggacgccttgtcagccgctgtgacgaacggggtaagtgtgctgaagaaaagcctgggcgaacctgatgtagattggagcgacacaggcgagcgtgccgatgccgatgccgccgagcgtccggccgatgacaaggacggcgtagtcgctggcgccagtctgcattgccgagccgaggaagaaccaggcaacgccgaggaagagggtgtacttgcgcgagatcttgtcggcggcgtagccgctctggagggcgccgacggcagctccgagctcaagcatggcctgcgaggagcggccgaggcttcagctgggttttgatcacggcgcaaagagaaaaagactgaccgtcatgagacccttgaggaagccggccgaggagctcacgtcgttatccatgctggggaacatgtcgaggaactggcgcagaccgaggatgacgctggaggtcggcgaggtcagctgacaagtcgcggagagaagcgcgacagggctcgacgaacctgatgagtccttggtcgaaaccttcgggggcggccaaagtcggtcagccgggaggcatagaagggcagcgcaacagggcaaaacaaaccgaagaggaagccaccgagcgcggccgccaccgagcaaaggacgaggaagggcgaggcaaagaggtcctggagattgaggttgggccaacaaggagggtcaacctctgccaagcagggcctgaactgaacgcggccgctcaccttcagggaaggttcgccataagcgtcggcaagcgctccgggctcgaggacgagctcctcgacgccggcaggaatggcgatgtcgctagcaaggtaggttggcggttagttcacgagctccatctggccaccgagctcgacctcggagcccacgcacgaaacgtcgtcctccttgtatggcagattgatcctcgagaggaagccgagcatggccaagttgagctgttgctggcagtagttgtgaaggggacagtgggaggctgggctggtgctcgtggccgctgttcgagacggtgagagggtgggagccgaaggggggatgttgggttgtcttcctttctccaaggacacgctcaccctttaagccgaagcgttgctgcggcagaagcggcgacgcggcgacggacggcgtcagcggaggccagcggaggcccggcgatgggcccctctacaggggacgcgaaccgggcggtagcgtcggtagttgggtcgagcagaggacgagttcaagcccgcgctaaagccggtcaagcggacttaaaggcccctgggctagaagaggtaccggctccttcctagtcaacagctggcccagctgtcaggggcaagacgagggcaaggatggcgaggagaagcgtcaggcgacatggcagacgttcagggcggtcgtggtcgaaggaaggcctgtcggtcggctgaacgaacagtgggcggcgggcaaactgctgctgcgcgctgcggctggctgccttccgcccctccgaccatgccttccgctcgctcatctccgcttctcgtccagatcggccatggtcgactcgtccggcactctggccggtcggtgggttgacccctgaggccggatcgcggacgatcgctcgctcataaggcgtcctcggagggaggcccggcctgcccaccccacctcattcgaccagacctcctcctcccaacctcgtctctccctacttcaaacgactcggtctctcagctacaactatcttctgcgattccacgatgcccgccacgtccgtctaccccgcccgtgaggtgcttggcaacgacgacctccagtcccagtcgtcggtcgtcgaggcttcgcttccgggagccgagcgcactcgcggcgtcgacgaggactacctgtgagactgctctccctcccgccttgcctctgctggagcctatgctgacccgtttggcatgctaccagctacgagctcaagatcaaggcggttctcccgacgcacgagcagattgggatcaagctggcggccgacgtcgacgcacaagccgccgccgagtcctggcttgcctcctttgcccgtgcggccgagaccggcgacgcaaccgccttcactagctcctttgcttcgttcggccactggcgagaccgcgtcgcctttacgtggagcttccggacctttaacgagacggacgctatccgccaagccgcccaggacacggtcggctcggccgaggcccactcgttcaagctgatcgagcccaagcctgcgctccagacgccgtatccagacctgtcgtacatccaggctcacttcgagtgtcagtcgagttcttccaggagcgatttcatggcgatgatctgacgctgacttgccgctttgcgcttccagtcaaaacggcactcgttcgcgcgaccggcatcgtcaacctgatcccgacgtccgacagcagcttcgaggcctggaccttgacgacggccgccgaagagcttctcgactttcccgagctcgagcaggccgatgggcacgtcatgggcgccctctcgtgggagaagcttcgccgaaaggaggccgaattcgagacggaggaccccgaggtcgtcgtcagtgagtgcagcctttaccaggcggcagcagcagcggtctgcagacagatgctaaaggccttgatcgcttctcagtcggcgccggtcacaatgggctctcctcggccgcccgcctccaggccctcggcgtcaaggtcctcgtcattgaccgcgagcagcgcatcggcgacaactggcggctccgctacgaggcgctcagcctgcactttcctcactgggccgatcacctcgcctacatgcccttcccgcccaactggcctgtgcgtgtcatctcttccttgtgcggggtggcggaagccgactgactagctgtttcttcaggtctactgtcccgccgccaagctcggcaactggctcgaggcatacgttgaggccctagaccttcgggtgtggacgagcactaccgtcgaggaggctgtcaacaacgagaacgactggacgctccgtgtcatccgcggcggcgaggagcgtattctcaggcccaagcatggtcagttgttttgtgtcggtggccacctagttgggccgctgacctgtccttgtatcgctgccagtcgtctgtgcgacctcgctctttggagcggccatgctgccgcagatcaagggaatggaaagcttcaagggcgtgatcaaacattcgactgcccacaccaactcggccgagtacgtcggcaaaaaggcgctcgtcgtcggcacgtcttcctcaggctttgacacggccttcgagtttgctcggcgcggcatcgacgtcactatcctccagcggtcgccgacttagtgcgtcaccttgcttcctctcacgcatgtcctcgtatccgcttcactgacccctcggcccgacctcctgcagcatcatgtcgctcaccaatgccgtcccaatgaacctcggcaacctttacacggccaagggaggtccgcctcttgagcacgccgaccgcatcgcccagtcgatgccgacggccgtcggtgaggcttttgcccggcgcaacacggcaaagctcgccgagcaggacgccgaactcctggccggcctcaaggctaagggcctccggacctggcccggccagcgcgacgccggcacctatgtcctcggcaactcgtaagtcaactttgtccctggttgctggaatcctcaacgtagggctgaccattgtcgaaccgagacaacagtcgcggaggcggcttctactttgacgcaggagcgtgccaggctgttctcgacggcaaaatcaaggtcgagtctggcttcatcgaccactttacgccgggcgccgtcattctcaacggcggtcgcgagcaggcctacgacgtcgttgtcatggccactggattcaccaacgtcaaagacaacgtccggcgcatcctcggcgacaagattggcgaccagctcacccagatctggggcatcgatagcgagggcgagctctatggcgcctggcgcgattgcggcgtcccgcggctctggcttcaggtcgggacgctcatgcaggcccgctactacgcccgaatcgtcgcgctccgcatcaaggccgagctcgagggtctcgccccggcgccatacgctggtgcccgcccatagatgtcgttgtcgcccctttcatcgactttcctcgcctcgactcctgcctgcctcccactttttttgtatcgctcgccttctggtctctcatgggtgttcactttggcagcaaaacagcgagccggtggacggcggggagtcatgagcatccagaacccagagcccctcacaccccctcggccttcggatccggcttgctctcgacgggatcgacctccatcttggcctccgccgccggagggtcgtcgtcgtacagcgactcgggctcgagtccgtcctctaacggcggccggtcgactgcgccagccatgaagaggggcgtcgtcgtcgcgatcgcgatcgcaaggacggcgtgaaccttctgggcgaaggccgggttggcgtcgcacgaggtcgtctgcgaggtggggcaagagggtcagcaagctccctcgtactcaacgatagaagggaccaagacgacgcacgagggtcagaagatcaatgatggcctcgtcgccatctaccgcaacgacaatcaccggccgctgcttgtcgtcctccggctcagggacgtttgccacaagcccctcgacgccctcgatgacagccccgttggcgacggcgctgccagcaggctccgtcgcaggcggcacctccgccagcacctcgtcaatcgccgcctcgatcgtctctgccttgacgctctcagcctcggccgccgccgccgccttcgccgctgccttctcgcggtcggcccgaggcgccttgggcgcgtcttttgcgcggtccgctcgagggcccttgggcgcgttcagcagcggatcggtcgcctgctctgagtcgtcaccggcgccagggagctgatcggccgtttgagggacatcgaccagccgggtcgacgacggcgagcgcgtcgtcagctcggccgcgccgaaatgggccgtcaggaatggcaggagccgatggacgtcaatcctggccgaggctggcggcggtcgtgtcggcgacaagttgtcgccgtcgccgctggccgaggcaggctcctcgtgatgatggtgattgtggtgatgcgagtgccggtgcttcttggtcgtgactgccggaagcaaaggggcgggaaagggtcagcaacgtcaaaccggcagaagagctgccacgcgcggacggacgtcgaacagaagccttgctcgactcgatctggaggacgagcgcgagtgcggcgtcggcaatcatgtcgttgctcgcgctcgcgacccattcgagcgtcagctcgcactcggccgtcagcttgaggtcgactgcgttcatcacctgcgggcgggcgacagggcgttagggtcgaaatcacagcagcgagacgacgaaacgacgaggactcaccctaagtgtcggtctgccctccttgtcgacgccctgctccacgtgcccaaacatgccctcgaggtgccaaacgacgagctcccagccgacgtcgaccgcggccgtctggcgctggacgatcgtgctcgactcgaggccggtaaagtctttgaggtcggccggggcgagaagcgtgtaagtgaagtctttgctgacgagcaggccggagacgagctgcgtgtcggagggcgggacggcggcgagcttgccgatcgcctggcgggcgggcggcgtacaagaggagacgtcagccctttgacgcaaactagacgcctcagtcgcatgaggaggcgccgcacctgcgccatgtgctcggtccggaggacgatgtcgagcttctccgtgttccgcggcgagtggaccttgacgtcgcgcccgtggtgtttcgcattcttctcgagctgattgcggaggtttgccatctgatggcgctcgccatggacgaggacctgcgcaatgagcaagcaaatgaagggggggggaggggaagggggggtcagccgttgtcgaccgagaaagtgaggtgagagagccaaagggcacgcacgacatggtccgccccgacctgctcgagaaactcagtgttctgcgtgccgtcgacgtgctgggcaaacgagacggtctcgatcgacatccggagcggcaccttgtggccgttcatgccctcaatctcttccaggcccgtcttgtcggtaatgaactgcgggcggccgagcaaaggaaggccgtcaacaggagcagcatcatcggcacaagacgaggaagaacgcacccgtgccatcgagccactcgtcgagtagcccgtcaaaatcaagccgttcttgctctcgggcgcccacttctccaacagcatcctgctcggcccggcatgcagcaagcccggcgaggcaagcatcacacacggcccgccatccttccacttgttgacgtcgcgcaaatgcgagatgtgccggaactggaacgggttttcgtgccgcgagaaggtcgcccggatcgcgccgttcatagagtgaatgtactgtttgtagacctccatgcactgccgggcaaggtgagagccgtagtagatcgggatcgcgtggaggtccgggtggcgtgaccagtactcgtcaaggatcagtaaaagctcgaccgccgagccggcgacgaagacggggaggaggcagcgcccgccgcgtcggacgattttggtcacctcgcctgggcgcgggagagaccggataagggaggtcagtcgggtcaatctggcatggggaggcggcggggaggagggggggacgaactgagcagccgttcctccttctccttgcgcccctcgagcgccatcgtcccaaacgtcgactcgcccacgacgatatccggccgctcgagcggaatctccgccggcacgagatgcctgtcgacctctctactgatatcgcccgtatagagaatccttacgcccgcgatcgagatgaggaacatggcggcgccgaggatgtggccggcgtggtagggtgtgaagacgatgccgccggggaggtggatcgactggtggtagtcaaccgtctggatggaggaaatggaggcgaggacgtcggattccgaaaagagggcgtcgtcggctccacctgagcggctgcaaccccggaggaagaggtcgcatagtcagcgactaaaagcgcggttaagcagcgcgaagcagggagaagcggggggggggggactgacgaccggacgcgaatgaagtcctgcatgatgtaccggtagatgccctttgtcgcgtgcgtcatgtagaccttgcccgggccgtcgcggaagttggtctgggagcgtcaaaggatggaagtgtcagccttggatcgcagggaaggggtgctgcgcagcaggaagaaggcgagggagggacgaggggctctggcctctctcggccctttctcccccctcccttgcgcccatcaaggccagagcaggagcgcagccaggggctcgtgaacgagcgtccaactggcttaagcacgccaggcgcacagcaggaagagcaggagggtggcgcatgacatcgcaggggcgaggcggcggaggactgaggcgaggcgactgaccttctccataatataggcgaggcctcctgcgtggtcgaggtgggcgctgcgggtcgagcctgaggtcagcctggaaccagagagggcaggctacgaggcttccgcccgcacgcactgggtgatgagcaggacgtcgaccgtgctccaatccaactcgtcgacgaacggcaggctcggcaggccatgtgcgcccgggtcgatgccggcatcgcacacgacggtcctgccccggtgctcgatgacgcagcacgaccggccgacctcctggccggcgccgagcatcgtgagcgagacggccaggccggcgtcggcggtggcggcggcgggaggcaagggtggcgtgtgcggccgcttgccggcacgcggcggaggcgccatccgctgtaaggtagagagaggagaggccgggagcgagagccgggagcgagggtgagcagcgagagagagggttgaagggtgagagccggttgagagggatgagcagtcaggggagacgcgtaacagtctcgtgactcgcctctgttacactgcgtaacatcccccgccgccgcccctccacaccctccctcgagatttcgacctgccgctctctcctctctcgcccgcagccaaccaccctttcctctccctcactccctcagccatggcccgcaagcgcaagaaccggactcacctcaagggcgtcaatagggatgccgtcaacgaggtcgacgtcggtcccgaatcctcaatgtgtcgtcgagcttgcgctgccgtcgctgaccctcgccctttcctcctgctctcccgctgcctctcgcccctgcctcctgccttgcgcctcctctcctccctcttgcaggcctcggcgcccaagtcgtttgtcatcaaggtctgtcccgcgtcttccgcccggacgcagagcagaccaatctaacccccccgccctctctcgcctactgacttctctcctcttctcccgctcgctcctgctccagtccggtatagtcggccactcagtcacccagctcgtccgcgacatccgtaaaattatggaaccccatacggcctcacgcctgcgcgaacgcgcgtctgcccggctccgcgactacctcgcgatggcgcctgcgctcaaggtgtcgcacctgatggcgctgacgctgagcccgacgacgagcacggtccacatgcgcgtcgcgaggcttccggccgggccgacgttgacgttcagggtcgagaggtactcgctcatgaagtgcggcgcctccttctctttctcttctgcgtctgcgcaggtcttgtgcgcctgcgctgacaccttgcgctttgctttcgcactagggacctgacgatggccaagagcaagtacgtcggccacccgccctcgctcgaagccttccggacgcctcctcttgtgcgctccccttctccgacattcgcttgcggcttgctttgaaattgaccttctcctcgtgtctgcctcgcctgcggcccgcagctcgtcttgagcaacttcaacccgcctccaggcgaggcgcctaagccgcagctcaagttgatgagcaccatgttccagggcatgttccccccaatccagattgacaaggtgcgcccttcacccttcgtcccatccgcgttcgggagtccgagagctgactcctccaactctcgcgctcgctcagtcggccctcccgtcgttccggcgcgtgctcctcatctcgtaccacaccgactcggccaccctctcgctccggcactacatcatcacgattcgcgcaaccggtgtctcgcgccgcgtgcgccgtgtcctcgacgcttccgccacctcgtcgaccaccggccgcaagccgctcgacctgacgaacgaccaagacatctcggactacctcctcggcctccgctcaacaggttacgacacggcctccgagtcggaaggcgactccgaggccgaagggtccgacactgggcccgggcagagctcgagaaagattgagctgccggccgactacggccggagcaagaagggcgagacgaaggctgtcaggctcgtcgaggtcgggccgagaatcgagatgaagctcgggaaggtcgtcgagggcgttgtgggcggcgcgcggggcgaaggcgaaacggtctggcacgagcggagtaagttccccccccctctcccttctgcttctcgctcggcatgcggctgactaaaaccgctcgctcatccgcgcccctcccccctcccccctcgcagtccacaagtccgcctcggaaaagacgcagctcaagtcgtcgcacgcgaccaaggccgcggccaaggccgcccggcgcgccgagcaagaggcaaacgtcgcgcgcaagaaagccgagctcgccgcgaaggaggcgctgaagacgtcgaagcgcggcaagcggcccactacggccgaggaagaggccgaggacgagggaggggaagagagcgacggggacgaggtcgtgcacgactacgagggcgaggacgagtttgagttcgaggaccgggtcgcggcggccgccaacaacaacaagaagggcaagcaggccgccacctccgcttcagactcggagggggaggaagacgtcgaggacgaggacggcatggccgactgggatggcgacgaggaggctgacgaggggagcagcgaggaggacgagccggagctcgacgaggacgccggcgagagcagcgatgagggcgaggaggtcgcgccgaggccggcgaggccgaggccgaccaagaaggtccgcaagtagcagattgggatgatggaccatgcgcgacttcgctcctttgcctcagaacatcgtcagggcaggtcggacgggtacggtgtaaacaggtcctcagccgcaaggtcacctccgacttctgaagcgcgtaatctcgtcaaatgagttcgattttttagcctgtcttcttgagcttccaatcgcatcctgcctccctgctagctttgagtagggcaaagtcggccagattgggtggatcgttgccagctgggctgctgcgccgagcctgccgcatctcccgccgagcgagctcgacgctgtagtagcatgcaacgtccaccaccctgctgctcgtcctttgctcgccgaatcacctcatccccttctctccaacgttcccggacacctgttgcactcggaccgccgcctcgcgccgccagacgaccagtctcgaccgcatcttgcaccttcggcttcgcccgagcctcagccgacctcctggtccagcgagctgtctctcgctcttgccctttcacatctcgccgtcgctcgtcaacgatggtcaaggctgcagtcggtcagatctgctcgacgtctgttgccactcgctcgcatcctgcttttgcttgagggctgaccggccggcctcccctcgcaggaacgacgtcgagcacaacctccagctctgcgagcacgtcgtccgaggggccgcctccgagggcgcaaaggttgtcttcctgcccgaagcagccgacttcatcacgggcgacgcgcacgagtgcttcctgctctcggctcccatctcgtcgcacaagtttactgtcggtcaccctttaacttgctgcagcttgcctctagccacacgggctaatctctcgcatgacgctctcagatcggcctgcagaagctggccaaggagctcgcggtcaccatctttgttggcatccatgacctgcccgaacctgggagcgaggaggacgaggaggagaagcccggcagcgagcgggtgttcaatacccaggtcgtcatcagcccaaacggccatgtcgtcgaatactatcgcaaagcgcgcccttttacgttcgcatcgtctttgcatggcaggcgctggcggctgaccctctcgctctgcagctgcacctctttgacgtctttctctccggcccaggctcgtccggccccaacacgtcaaacgagccggctaagaagggcggcgaaagcctgcgtgtccgtccgggccagaaggtcgtcgagccggtcccgaccgagattggtaaagtgggcttggaaatctgttatgacctaaggtaagcgacgtctgccttttacgagagctgccggctctctgacctgacgtccttggcccttctcatcccaggttcccggagctgcacacgatccttacgcgcaagggcgcgaccattctgaccttcccgagcgccttcacattgaagacgggaaaggaccactgggcgacgctcctcaggtcgatcgccatcacgtttcaaggtgtgtccctgccgtgtgagatgagttcaggctgggctccctgacgcccgcgtttgctcctccctacagtctacgtctttgcctcggctcaggcgtgcgtcgctaagccccgtccgctcgcagggtctgcctcactgacgcccactccctctccatggccagtggcgctcataacccgacccgcgcctcttggggcgaaacgcttgtcttctcaccctggggcgtcgagctcgcccggctcccatcgattgaggacgtctccgaggccgagcgtccgggcatgaagccctcctgggcggtcgtcgacgtcgacccggccgaggtcgaccgcgtgagggggatgattcctgtcgcgacgcagaagcgggccgacgtctatggcgtcgtcgggaaggatctctgagatcgaggatcgatagaatggacccggcccacagtgtctgcacggaagtctactagtagaggagatgacaggacctggactcgtacgcatgcaggggcagagggagagattgagcagctcgtgccaacctgaccgcgcatcctcctcctttgcgccgtccgatcgtcccttctcacagtcgacttgcccatctctcccttctccacaaccatgtcctcctctccacctccagctgcagtagctgaagtctcctcgacgaccgagctcgagcccgcatctccggccacgaccgagcccgtcctctccaaaacgcagcagcgtaagctcgcccgtcagctcgccctcgccgaggccgaagccgccgccgcctcgtcggaaggcgtcagccggccgcaaggcccagcgatgagcgtcgaggaagccgaggagcggctcgacagcgttggaagtgcttgcggcgccgtccttggtaagcgcatcaagctcctgaacaagaaggcggtccgtcgttccttctctctactcttgggagcacttgtcctctacacgtcgtctagtagcgcatgagctaacgccttcccctcgccccccctttgcctacttgctgccttccagcaacgccaccagacgtacaaggacatccctgtcggtcccccctccgccgagcacaatttccagctcgcacaagctgacctatcatctctccggcactatctctcgcccagacggcctcgctcaatcccgatcaggtccaggcgctctcaaagctcgacggactggtcgcgacaatcaaggagctcgaggagatgaaaaaggcggtcgaggtaggttcactcgcagcattgcgatggtcgagctccggcttgaccctacgcgtgtgggagagcagtcctgaccctctattcttgcccgcttctttaaggtcgccgagctcgagcaggcggccgcactccgggccaagaagtacttcgatgctgcccaggtgagcacgcggctcgttcgaggcccgaatgttcacttcgacggccgccctgactgagcgtcgcttcctcctctcgcttccttcagtccgaggcacacttttcgcatctccagacgcttctagccctgtcgcgcctccacgcgatcctcttcccttcttcttcctctccgtcgtcatcctcgtccttcgcacccagcgcgcttcccccgtccctcgccaacctgacggctcaggaagtcgccgcggtcggcagcctccagcacgcgctcgtcgcccgccagcaggtcgggctcgtcgtcgagctcgcgaagggcgagacggagagcgccgtcctcgagggcgtgtcatttgcgcgcgtgctcgagatcgtccgatcgctccctgagcccgagccggaggcggaggccgacgagcagccgtcagtcgaggctaaggtgaagcccaacacgtcgcgctgctaccagcctccgatccagtttggctcgtcaagcctcctcgacgagacagacccggccgtcccgacctcgacctcgacctcgaccggccggacgtcgcccgacgccgccgccgccgtccagcacgcatcgttcgcgtcgggcggaggttgccagcagcagatgtcgttcggaactgctgtcgaggcgtccgctcctccttcgcagcagatctcgagctcgccggatgacaacgacgacgtccgtggcaaagctggtctcgagggcgagggcgagacgctcgccgctgtcgacgagacggctgccgcgaaccagccggccgtccccgcgcccgcagaggacgccgacgccgtcgtcgagcgtctccgggtcggtgccggcggggcaggggcgtcgtctctcgactgggcggcggacgagcctcctgcaatggcggctggcggcggggacgggacggtgacgcctggagggagcgtgcgcaaggcgcgaggcccgcgcggaccgcgcaaccggggcggcaagacggcgaacgccgccgcggccgctaccgtcgccggagagacaacggacgggcagatctctgctactgtgggcggcgagaagccaaagcagcaaagggtgcgtgcgcctcgccagcccaagtcgacagccgagaacggcccgtcgtcggcagcagcctcagctgccgccaatgacggcaacggaggcgaacagcgacggcgtgctcctcgcccgcctcgcaataaagagggcggctcgggccgggcgacaccgacgatgggcgtccagcagcagcagcagcagggcgcgtcgaccaaccggcggaacggcggtggcaacagcggcaatggtgggggaggaggaggagctcggcgggagcccaacgccgctagtggtggagaggctacagctcggccccctcggtcgaacggtaacggcgccgagcgcggaggggtgcggacgcctcgcagcggtcgtggcggtcagcaagcggggtctgcagctgctgccagcgcgccagccaaggcggcggctgtaccggccaccggcagtcagtagagctgctttcggcctggcccttttcgagagggaagaaagcgacggaggactggactgaacgggccttcgccctctatcatgaacccttgctctcgatatcgcgagcgagctggaagggcaaagatgactgctgcgcgcccgtctgcgcttccctctcgtcgcgtcggcccgtcctcatcgtcgtcgtcctctctttgccatcggccatcatctcgccctcgcatgtcgtccgccatcaaacgcgaaaagcactcaaccttgccttggacctaccccagcaacccgactgccatgtacgccgacgacgaggatgaggaggtggacgagctcgcaccggacgacgcgccgttcgacgatgacgacgacagcccgtcccggccggaggggccagaggttaacgacgagggcgatacgttctaccgggtgcgtctcgctgcttggacggctatgaggcggtcggcaggtcggcctggccagctccagctgtcggtgctagcttctctcggctgggctggccagccggcagagctcgagcaagagggatcgcacagaccgcctgcctttttgccaaccttcctactgacacgcttctccctccgccttgtcctactcttcctacgtcgacgctgctcctcttctgctccctgctcagattggcgaaaagatgcgcgttacccagcggacgttcaacggcaagctcctgatcgacctgcgcgaggtcagcccgcgcagccccttcccctatctcttctgcccacagccgctgctgaccctcccaccaatcctgcccgcccgccgccagtactacacaaaagacgatctatggcttccaggcaaaaaaggtctcgcgctctctctcgaccaatggcgcgcgctccactctggcccaaccgccgggctccttgccgaagagttcgatctcgacacgcccggcgcaacggacgagcggctcgagcagagcaatgagggagagcggttcttccggcttggagagaatggggcggggaggctgaggagggtgtcgttgagagaggtgaaggggagagaggttatcgacatccgcgaggtgcattcctcttctaccttccgtgctcgctccgggtgacgcgagtggctgacgccccttcgtcgacccgcagttctacctgaaggacaacgacgaagcgcccgggatcaaaggcgtcgccctccagctcgacgagtggcgcgcgcttctccacgtccccgttgagatcccaacgctcgctgcccggccgccggcggccgccgcaaccaagagacaagcgtcgtcgccagctggacccgggccttccacgacagcagcagcagcagtagctgtcccgaaggcgccagtcgagaagaagcgccggctgagcgctagtggcgcggctggcgacgagcagacggttggtgtcgagcggttcgagacgaacggagaaggcgaaccgtttctacgtgtgcgtccaaccgccctctaccttctacctcgcgtacagtcgcacgtcttgcccgttcggcgagctttgtccagcaagggtgactgacaattctcaccccgccctcactccctttgtccttccttctgcggcctgatcctctctctcccctgcgcggcctaacatttcatttccctgtcccgtgctgtcggtcatcgtcggtctctctttgccccttccgcccatcttttcccgtcccgtccattcttcaccccctagcttggcaacaaccgccgcctgacagtccgctccttcaagggcaagccactcgtcgacctccgcgagtactacgccgacgcggtcggcgaggagaagcctgggaccaagggactgtcgctctcggttgagcaggtgcgtctccttctcgacccgcatcggcccctcctcccgcagactgaccgatcgacacctcccgtttgtgcggaccgacctcaaccgcgccagtgggccctcgtccgctcgagcaccggcgcagtcgacgacctcctctcggacctgctcggcggccagccgcccgccgcacccgcattggcagcgccagcggcgagtcgagcggcggcaggggcgaaggcgtcggcggggagagggaggggcgcggcgcggagcggagctggcaggggcggtggtaaatggagagggaagtgatgaaggcgtcggtggcctgggaagagggaagcgcgcccttatcccaccgacccgtgcgccctcttcgtcggtcgaacgatttaagctgctttgatacaagagcgcatacgagacgcacgggacgagggggtggggcacagcaaaagcgatacttcggccgagctcttcgcagaagagcctggcgcgagaggggaggggttctagaggtaaagggggggggaagggggttagtgtcgatcggaaagcagggaagacgggcgttggacaagggacgcacgagccatggcgtcctcgattttggtaatctcggcaaagtgcttcgtgttgggcactggaagaggagaggaaggagagggggagggggggtcagtctcaagccgacggagcgaacggcggaaggcccggtacgcacggccgagcgccttcatcccgaatgagtggcgcgcctcctggaaatgccgctcaaacgtctttcggcccatgtacttgaagcccgagcaaatttcgcactcgaactcttggccgaggccgtggagcttgtagagccagtacgggattggcttgccgtcccagccgagcgggagcttgagcgggttgtagatcttctcttcgccgtccgcgccctcgtcgtcgtcgagcccattcgtattgccgtcctcggcaaccggcgccatctcgaccgcgggctcttcgagctcaagctcgcgctcccgcgccgtcagcgccgatcggcgctcgacattcgccttggtgtctgcgagcaaggtcgtaaagacgggcgagagcaggagcgagcgcgtctggtacgtcaggagcgccgccggccggagcttggccttgcgcagatcggcgaaggatgtcgtcgacgacgacggctggtcgcccggcgccgaggcctgaagccgaccggccgccttctcgtgcttcttcgacttgaggtgtgcgtcatagaccgtctgttttgagtacagcttttggcctggaaaaaggtgacgaggaggtggggaatcagcagccggcgcgaatttccccgcaaacgagatatgcgtccgagaacgcacaggcagcacaccagatgccctcgcccggcccgctcccgcccgctcccgccgggccatcagcctccggctcccagcccgcaaccgcgccctcggcccacttggcgtcaaactcgagctcggcctgctcgtcgaacggcgcgaggtccgtcaaaggccgggttcgtgcgatgaacgagaggaggtaggcgtgcagggcggtgatgtagctgggggagggccggactcagggggttagttgggcgctcgtcgtccggcgagtcgagacggagcgaacacgagaacgcacgcgaggaattctggtgagctcttctccttcctgccaatcgactcgtccggcgagccctttgcgagcatgtcgaaaaacgggaggtaagggatcctgaaggtggcaaggcgcgcggcgcgcgagggacagtctcgtcagcgaccctctcgtgtctcctctgccttcgcggtaaggctatgtagtgacggacggacttgggtgtgtttttgatgttgatgtactgcgagtggtagaggtagaggtcaaggaagcgaccgagcccctcttcgccggagaacagcgaggcgagctctgcgccaggcgaccggcagaaggcatcagcgcctccagcagcctagagagcagccgcatgataggaaagggaccgactgtcgaccggctcctcggcgccgacgccctcgaccgccggcggctggccctcgacgagcagcctgatctcgctgtcgaccgcccgggcgtcgacggccggatggctcgcgtggaactcggtgatgccccggagccgggcgtagaactcgtcgaggtcatcggccggcgggggcggggcagccaggacggcgagctcggttgcgcgcgtgctggagacgacggatgagggggcgaggcaaggagggaacagacggcagggtcaacgtcgtgtcctgccaatactcgacctcatgcttgaaggagaagggacgcacccgtgctcgtcggcatagtgctcgctcagaaactgcttgcgggcgacgatccggtcaaggatgtcggatgcccggtggtccttctcgagcttgtgcttgtgctgcgaggaggaggggaggtaggcgacgcagggttcagctctggctggctgagagaaggcgactctcccaggggcggaccgtcttgtctggctggaggaggatggctgcgagtgcctgctcgtagaggtcgacctcctcgtgggcttgcctggccgtctctacgatcgagttcatggctgctggtcgtggtcgtcggcgggaggaggggcagacgtcgttttccgccgccagcgcgtccgacaagcagctggctgccatcactgaccgacccccgacagcatacactccaaagccatggtcagcgtcggcctgcttgcaccgctcggtcagtcgcaagcaaggcaccgtggtgaggttcaatcgagctgaccgcctgcctgcttcccttctcgctcttagcctatggtaagctcgacccggatttgccagcacgagcgcgagatggcgggactctccccgggactgacaccctcttgccctccctctctcgcagtcgccgtcctcgtgacggccctcggcatcttctcgagcgtctaccgccggcgcaaggctggtccgtccatcatgttcgaacgagacagcagtctctcgatcctttccgggctgaccctccactcgtatctccgcacgcccgcccgctattgccagtcgaggcccaggcaacgtcctggttcccgccgcacaccgcccgcgacctctacatcagcctacttcagctcgaccccccgccgcccgagtcggtcctgaaagcggccctcctccagcgggccatgaccgacgtccgccggatcctccggatgcgggacgacaaggccgcggcccagctgctcctccagaagggcacggttggcgacgagctctggagcctgctcctcaaggctgagaaggagctcgaggccgaggtcctcgacgtcgtcaacgaggctaacacgtttagcaacgcttggggcccgggcatcttttcgaccgctggcgaaatgtgcatccgcgagaagacggccgtcgactggaacgagctgccggagggcccgctcccgactcgtgcgtttgcttcgaggcggccgtttaggacatgttctcctgctgaccgttcattcgctcgctcgctctcttcctacgactcgcaaactgcagccgttctgcagcccggccgccccgcacccggctcgcccgcccccgccgcccagatcagcacgccctcgaagccccgggccgcagtcaccgcctcctccgcgtccgtcgcctcgccgaccccgagcggctcggcctcgcccgcgccctcgtcatccggcaccgggacgcctgccttggcggcggtgggaagcgacggaaccgtctcgccctcgacgggcacgccggccggcacgccgtccaaggtgcgtcctgcgcccggaggcttacttgagggccgggggagctgactccgtcttgatcctcttttgcgctccgccagtccgccaagaagaagaacaaaaagaagtagactggagcggtcagcaacgagggaggtgtcgcgtgaaacgagcttctgatacccatgccccccttcaatcgacgccttgcgcgcgccccgctgccgtgtgccctaagccatctcattactgccagtctgagctgccgccgtcgccccacgtcccctcgtctgcgccgccgcccgtcgcccacgggtcgtcgagcagctcctcgccctcgcccatgccatcgagcgtgtcgcgctcccaccagttggcgcccccgtcgacgtcgaggccggcagtggtaggcggaaactcgcccctcgagacgtcgtcgagcgaatcgaagccgccgctgccgccgccgtcagtagagcgtccaatgtcgtccaccgcactgacgccggcctgctcgcgcgcgatctcgtcgtggatcgagccggtcatcatccccggcgggaggggcgcgtcgtgctctgtccggttggccagcgccgtgtctgctgcaggaccttcagtctgggccggatcgagttcggagccgccgccgccgccgaagaaggggaagaagggcatgaagccaaagccggacgagtggccggaactgaggaagggcgtttgagggtcagctgagcccaggatagtcagagaaggaatgataacttactgtcgggaaaagaagtcgaagtcaactgtaatcagccggcaggagagcagcgtcagaagagtcagcgctcgagtacatcgattaggacgaacgtcaaaacgaaaaagggaacgcaccagagacggccgtcgccagcaagactgcccgctcgtcaagcgacaagccctctccctgcgagacctcggggacgacctcggcctcgcccggcttggcgcgcgacgtcggccgcgtctggttcgggtcggcggccgcctcgagctcgtcggcgacggcgtcaaagcgtaggacataggcgcctgtggacgacaggaaaagtcggtcaggggcgatggaagcgggccagcagggacaaagcagacgcacccgtgtcagtgaagatctgatggaggaaagcatggcgctcgcgctgggtgagttcgagccttctcttctgggcggtcactcaagcaggggctcgaggggctcgagcgggctcacctcgcggccgagcccgccaaagttgcggttgatggacgccctcgcccggccctcgacatccttgagccaaaagtcccagctccagagcccctcgtcgatcgcgccaaactggtcgagctcgaggttgctggcgcgctgcctggcacaaaaaagatcgtacctccggcgccagagatgccatgacctgttggcgcgtcattgttgtcagagcggatcagcgcaatgagtgtaaaatggaagaaggggggactgactgctgcgcctcaccgacaagcgacgcctcggacccttcagacgagtggacgtagatcctgctgttgatcagctggaacggcctccggatccacaggatcggtttaccctcgaggtcgaggacggccgcgcggaaaggccggcgtgtccggagcgcctgtcgcgagacggtcccgagcaggcccgactcctcctcgacgaggtaggcgacgggcgtcccgtcaagcgagctgatcacatacttgttcgactgctcgaagccgacgaggacgctcgcgatctccagctgtctgctcagaggcggagcggggaagatcagtcgctgtttcgaagaagggtagcaccttcactgaccggctgatgacgaggcccggctggcggagcagctgggtcgcactgtgcgtggaccgcagcacgccctcacgatcgtccggcatctcgacgatgacctctgcctggctcgcatcgtgccgtggcggccgctctgagcgctcctcgcgccgagggatcgtcaggatccgggctgggtctcgcctgcgctgacttgccgctggacgatggacggggagggccgctgcctgggccgagtgcgagagcggccgccgtggcgagaggagcaaaggaaggcctggtcggatcgcggccggtgaaagtcggacgggtgcgtgcgagagagcacgctgcatctcgctagaggttgtgaaggggtggaggaagcgttgtagaagcgaagtttccgtcggtggtcgaggttcgagggagaaggaagggcggccggggtcgtgacgaagcaggtcgagccagcagcagcgacgacagcagtctccggcccgaccatcactcgccctcgactcgcgatccaacatgttcgcccgtactgcccgctcgaccgccgccctctcgcctctcgcccgccggacgatcagccggtcgaccgtccggcccgaggtgttccacaatgcctcggccgagacgtttgagcgcgccgtccttggcggcaaggacaagctcgtcctggtcgacttctacgcagagtgagctctcagctcctggcttagagaagggagagacgtcagctgacaagacgccctgctcctgcctgtttctagctggtgccggccgtgcaagagtgcgtttcggcagccccggtcctcccgaggctgcaccagtctgctgaccgagcctccgccgacccacccatccgcacgcagtgcttcagccgatcctgacaaaggtcgcccagaaggaggagctcaacatcgacctcgtcacggtcgacactgaggcgctcgaggacgctgcccagaagtaccaggtgcgaagccggcgttacctggctcgcacatcgcctcagccgaaagcacgactgacaaagcgcgtcgtctcccctcgccagatcacgtcgctcccgaccgtctttgccttcagggacggccaggtcgtcgacaagtttagtacgttcgcacagggtcctcgcccaaatctccgcatgggcaggcaggcgactgatcgaccgttaaccctcaccgcgtgccagtcggcatgaagaacgagaaggccgtgatcgactttgtcaacgccagcagcgccaagtagcttggaatctagatgccgttcgaaaaggcagctgccagtgactggcagaacgagatagggcatggcgctcgcaccgtcactccgtaaggcgaaagcgcaatgtatacctctgcgtaaggctccagattgcctcgcagaccgcacaactccccccgcggcgctcagtcatcaaaatctccgagctcgccgttctcgaggcatcgctcgcggacctcgcgccagacgcgcttgcgcgcgcggccgacgccggcgagccgcgacttgacctcctcgagccgctcgacgtactcgcgcgagtcggcaaggagctcgccctgcagtgcagcgggaaggaaaggagcgacgtcagcacgtgaggacggagatgggctcaacctctgtggcggcggcgagggacgtacgagcgcgtccatcccccggtagagctgctccctctgctcctcgaggttgagcacgaccttgtggatgccgttggccggaccggccatccccggcggcaagtggtggtgcgggtgtgccgggtggtccgggtgcaggttgacgagcggaaggacgacctcgacgccggccggcgtcaggaattggcgctcgagcgacgagagctttggcggcggctggggcacctgctgaagcatcggcaggccgtttgggccgaggacaagcgtccctggcggcggagggtagaggtgcggcggatggggcggcagagcgaacggaccgcccgggagagggaagccgtcgggcccgatcagagggatcgcctggggtggatggagcagcggcaggccgtccggacccgttggcattggagggaccagaccaccgccggccgcagcctccccatcgtttggtgccggagtctgctgctcacccgctgcggcggcctcctcggcagcctcgtccgtcgacgactgcctttggtggccgcccggtccagcgcgcttccggagaccgacgccccgctcgcgatggctctcaaagaactggccgagcgcgcgggcgagcaagctctcgccgtcgatgagctcgcccgccgtccggccaagggcgtcctcgaggtggcccgaggcaaacgtgtagcgcatcgcgggcgagaggacgacctcggtgaaagacttgggcggctggaggagcgacgaaagcgaggctgaggttgggggcggtgaaggcgggtaggccaggtgcgggaggagcggtggcgagagcgagcgggcgcgaatcggctggccgccgccacttgcaggatgaggcgagctcgggccggcaatggcggcgtcagcagctgcggcgtgggcgagctcggacgcctcgggcaggtgcgagagcgttaggcgaagccgcttgcgcaggtggtcctcggcctggcatcgcagcgtcagacgtcagtcaagagtgcgacgaggctgctgggcagagcactagggcagaggaacgcacctcgcgctcgccagagcccatcccccagctgacagccttgcccttccggacccatcggctgcccgccttgagcttgctccctctgtttccttcgcgcgcgcttgggtttgcgagctctccgctcgcgccaaacgcctcgcccccgacgagctcgtcgtcgtcgccgtcgttgtcatcctgctcggccggcccagcctcatcgtccgagacagccgtcccgtcatcacggaggatgagcggcggtctcggctctttccggctcgcatagccgcgttcgttccagggatcggcatcgacggaaggatggggctttgcgacgaaagccgacggagccggaccgggtgggaaaggctggtacgacgaggtcaggtcgagagagggcagcgagctggtgcggcagcgaggggtcgagggatagaggcaagatagaggtcggagcgagcgtcagttggcttcgacagaaaggacagccgcggcgtgcttcgggagttatacagccatagcaagcgaggagagggacggacaggaattcgtctccgggcgggatcatgcctcccccgacgaggccactgccgccgaagcgaccaagcccagcgccagccatgcctggcgggggcatcatgccagggtgcgcaagctgatgctgatgcgggtgttgctgctgctgctgctgatgcgagtgctggagcggctggccttgctgctgctgctgtggctgctgctgttgttgaggctgaccgaccgctcggccgtaacgcgccggctggccccccgcctgctgctgctgctgctgctgctgctgctgatttggcggcagacctccatgctgctgctgctgatgggcgtgcggcgggtgatgggggtgctgctgcggctgctgctgctgcatgtgggggtgaagcatctgctgctgctggcggtgttgctgctgctgttgagggtgctgttgcggcggattcgactgcatgtgctgctgctgttgctgctgctgctgagggtgatgggtagagtggccctgctgttgctgctggccgggtgttgtcggcggaggaggcggccgttgctgctgtcccggctggagaccgtgctgctgctgctgctgctgctgctgctgctgatgatgatggtggtggtgatggtggtggtggtgatggtggccctgcggcggcggcggcggaaggtggccctggggtggcggcggcggtgcctgggcgaacgacatgctgtggctggtcgacgagagagacggtcaagacggcggcggcggggcgagcgcgggcgcggagagaggccagatgaccttttttttttctcgcctgccctgcagcccaaccagccgtccctccgtcctcgacgagccgacctcgccagcctccttcctcaacagcatacggatcgacccccagcgaagtagagggttcacaggatctccgtctgcccgatgccccacggccgaccagcgcgcctctccctcggcggtcgtcccagatcgacgcctctcgtcggcctgctcctacctgctctcgccgcctccgccggccaccttgcttctctcccgcggccggatgattggcagcgccaacggcagcaacagcagcagcagcggagagccgtctcacacctcgcccgtcctctgccagctgatccgcggctcacaaagggcgccaaggtcgtcgtctcgctctcgggcggcgtcgactcttcggtcgcgctgcgcctcttggccgaacacgtcagtctgccgcacctcactgcacttcaaagctgcgctgcagctgaccctggtgccctctttcttctttgtccctcgcacgcatgttgtcatcgtcgctgttcgctgtatccctcccgaccgggctcccttctctgcttcgccgcttgccccttttccaaaccggccccttcgccctctcgaccgcaggatctcaacctctcggccgtcttcatgcgcaactggtcgatcgaggaggaggacacgcttcgcggctgcgagtgggagcgcgactgggaggacgtccggcgcgtctgcgcgcacgtcggcggcgtcccgtgcgagctcgtgcgtcctcggtcgaatacctctcccttcgctctcgacgttcgaacagcagctgacccgggtcaactctcatttcgcccttagatcgatctctcgaaagaatactggctcgatgtctttgagccggcgctcgaccactggcagcgcggcctgacgccgaatccagatgtcgcttgcaaccggtccgtcttagcagccacagctttccaacgcttgagtctcttagcgacggccgactgaccggcacatcctcgtatggcagggagattaagttcggcgctctttttaaccgcatcttcccggccatcccgggccaatcatccgcctcgtccgcgacccaaggcctgcttgcaacaggccactacgcccagaccggtctgccagcctcgtggcagcccggtcagccggccgagctcctgaggtgtccagacccggtcaaggaccagagctactttctgagcgccgtcgacggccgggcgctcagtcgggtgcgtctgcgtccacgcttcaaggagcgcatccaccagcgaatctgctgatatttatctcggcattcgtccctcggacagaccgtcttcccactcggtcaccttcacaaggccgaggtccgcgagctcgctcgcaagtacgacctcccgacagccgaccgacgcgagtcgatgggcatctgctttgtcggcaaccagcagtcggcctccggctttaccgatcgcttcctctgtccgtcgctcgctattcctttgaccgctctccatgcgctcgactgacagccttcgctcgctcgacccccctctcgctcatgcacgccgctagctaaatacatcgcgccctcgccaggccccgtcctgacgtcgaccggcgcccacttcggcacccacggcggcctccactcgtacaccattagccagaagttccgcaagtcgggcctgcccgaaggcggcccgcgctggttcgtcgccgcgaaggatcgcaagaacaatgcgctcgtcgtcgtccccggcgcgtgcgtctcagacgatcatggtcgggtccgtgcagtcctgccgagctgagactttgtcctcgtgcttctcggcagagacaatccgcacctcctctcacggtccttcacgactactcgctggaactgggtcgctcgcacgccgccagccgagctcgccagcatcgagggcctcgctgtcggcgtcaaagtgatgagtgtcggcccgcctctgcccgccatccttcgctcgatgtgcgtctctccttctgtcaacttcaggcgtttcgatcagcgcacgagctgacgtcggtctgcccctctttgcgcctcgtccaaggcccgacggcatggtctccgtcacctttcccgccgacttcccaggcatagccgtcacgcccggccagacgtgcgcggcctacctcggtcagcgctgcctcggcgggggcgagatcgtcgagcgcgagtggacgtgggccgagggcgtcgtgcccgagaccgaggtcgatgaggggccgcgagtgagcaagcgggcaatcaggcgggctgaaagggcggagcgcaaggagcgggaagcggcggagaacctgatgtgaagcgcttctttgtcgactctctcgggaagaacaggtagaccgacgaccggccaggactcgtgcgaaagtcgagcgcgcagttggccgagggccgccgtcgctcctcctgtcccctttgaccgccatctcgcccccaagcccacgctcgccctctcgttcttcgaagatcaaagaccgagcctcactcgactatggctactcgtacgttgcctctcgctgcctgccaggtgccgagaccagcgatgtcacgagctgacggccgcggcgagcttaggcatctcaacgacgagctcgacgacccaccggcagtcgatcgccccctggtcgaccaaggccaccgccgctggagcgtcatccaaggctaggactgctgtcgacgagcgtggcgaaggcaggtcggctaccacgggcaaaggcgctgctcaggccggagcaggctcaggggaaggccgctcgatctccaggcgcgttgaagcggctcctcggcaaagcacgatcgccgagcggcatccgccggcacaagaacggcagcatgagggccaccgcgagaccgaggagcgcaagatcacgcgcgaagtggaagacgatgaagagggcgagggcgccgacgacgagctcggtggcgagaggcacgtgctcgccagccgctcgagcccctttctccatctcacgctggccttccccttccactctcagcagccaggtcgacctcgcccaaatcaccgaggagtatcaggctcggcgggcatccaagtcggccgctgaacgcgaggccttcacccgctcggcccgcaagccgctcgaagacctgattgacagggtcgagcacgagttcgcaaaaaacgaggaccacctgtgcgtcgtcctccctttccgacccgtcatgttaaagcatccatctgagtatctgcgtagcgcgctacagagacgccctcctggagcccttcatcaagtcgctggagtcgtccgccgtcgaaaaccgggccggctatctcgcgtcgtctcacgttcgaggtgtacgtcgctgccttcaaccggtcgtgaccttgcccatcactactgacgacattcttcggtcgatgacaggaggtcgaagctcggacgatcacccagatcgagcgcgtcaccgaccagaccctgccgcggatcgagcagaacctgcgcaaggacctcgccaccagtgcgtccttgcagatggcccgtgctcatcgcttccctggctgatcgtgcgccttccctcagtcgaggaccggccggccatccttaagcgcgagaggaagcggctgctcggccaggctcagaagcgcgtcaaggacgagttggagtcacaaaaggtgcgctgagtctgccttcttaccccgaccgccaaccagcgtcctgactcaagactcccctctcaccgagctcatggccgatgcgacggccatcctccgatcatacgttacgatgttcgctcactaccgtcctcctccagcactcaacggccagccgacgacaccgaccagccacggcggcagcggcaagaaggccggccgcgcaaatggcagcggtggctcctcgcgcactggcaaaggcgaccgcggcttcagctttgtcgcaggcgcgcactgaccgctggtccggggcggtcggcaagggcaaaaagctggtcggctgtgagctcatgtggcttctcttcgcccgtgccttgatcgcttgcatgcaccgctttctctccgcctgaaggaggacccattgacagcgatctcgacgccatccgctctgccactgtcttctcccgttgggcttggtctgttatcacatgcgtttttatgcagggtgagctggacgcgtcttcgagacggcgtcttttaggtttggagggagggaggcgcgcgaaggaaggaaagcatggggggcggggttgcttgtacaggttttttgcgtgggaaagtacaggcagtcggggaagagaaggggtcgcacgctctcgtgaggagagaggagactgggttgagggtcgggatgcaagtgtgggcgcggtgctagtggaggttgagtttcggatcgggctttggtgatgggttcggcgtgcgatgcaagagctaggagaaggggagagggcagcgaggagaaggagggcaagcgtccactagggacgggaggtatctagatggcgggcagagaggggtgaggggtgagggaaggggagggcatgcttgttccaccggggcgtccggtttgttcgggtcgggccgagtgggtcgtctagcgggtcgataggcgtcggcgggatagggcatgcgccgggtgagcatgggggaggggcgagacgccggttgaggacggccgcatggaggaaaggaaggtggttggacaacgttcgagctgaaaaggaaggcgagaggacaggtcagcgactgggtttaaggccgaagacggtggcaggtggtacgcaccgagagagagggggtcatgaggtgacgtgtggagggaccggtcgtgagagcgtggcaggagcgcagagctgagagggtcgaggaagcgggcgaggcgagagcggaaggcgggcggcccgatggtcgagcagagaaggagggcgacgccggctttacgcctcggcgatccggagcgagcgcatgcgcccgcgcgagtcgtcggcccgcttgtcgtgctcgtcacggtcgcgtgaccggcttgaattcgcgctgtgcacggcccggacgaggccgtcggacgagagcgtcgtgaacggggccggcttgacgacgacggtcggccgccgaccgcgggtcccaagcccgccgagaccgaggtggctcggctcgggcgaggtcgagagcgagcgtgagataacctcctcgtagtgctgctgcttgatgccgtgcccgttcgggccgtcggtcggcgtccgccggcgagagcttgagcgaccgcgaccgtccttctcgacgacctccgttgaggcctgctcctcgctcacgcgcttgatccgactcgagtcgcgccggccgcgaggcgtcgcctcctcgcgctcgtcgacgatggtccgatcgctcggacgccggctcgactcgccgcgccggccacggctctcggacctacggtctgtgctcgaccggccgctccgaggcggcgaacggacacgcgaccgactccgactcggaagcgcatcgcgtccgcgactcgagctctcgcgcgaacgctcggcgaggcggtggcgctcggccgagcgcgagcgctggcgactccggccacgccggccagaattggtttcgagctcgggcgacgagacgtccggcggctgggcgagcggcgaagggtgtatcgacgcatggtcggacgagtccgagggaatgcgcgagactggcgtgccgccttcggacgggtacaacgaggtcgacgcgagcgagccgacgtagtggttggccgggaccgaggcgcggcggatgaaggccggcagggctggcggcgaggcccggaccgaggacgccgacgtcagcgggacgtcgtggctgtggtgccggccggtgttggcaagcaggcggtcgggcgaggggacgctatccgagtgcgtgtggtgaacgtgcggccggtggtcgtcctcgtcttccgactggttcgggcacgggccggccgtcaggtcggtgtcttcgccgtcgagcctaggcaggtggtggaccgtcagatcgctcttgatcccgagctggttgcggccgtagagggccgagtggaggagcgtgcacccgggccgatcgcaccgcaccttgcctggcagcttgggcagcttggtcggcgcgacgagcggcgagagcatcggcgagagccgcgggctgttgccggcattcgagtggttgcccgagaacgactttcgagtcgggccggcgatcgggaagagggcgagcggcgacgtcaggtggcttgtcgcccctggccgacggacatacttgagcgtctcgtcgccgcgcgaggcgtggccgtcgagtgaggccggcgcccggacgagcatcggcggaatcttgacgggctcgacgagcggcgagccggacgctatcgggtacgcctgcggtgggagcgcgagggccggcggcgacgagccgagaacggccgtctgcgaggctccccagggcgagggcgaggtcgacggcgacgacgtcgtcgaggccgacgaggacgaggcccggcccgaggcgccagacgacgaccgatgcgaaggcacgagcgccgggactgcgctcaggaagggcgaggcaaactcctggggcgagagcatcgagcgcgagctcgcggccgatgagacgccattgtcgacgtagggcgaccgctgctgctgctcggcgacaatcttgtccttggccttgcagtcatccgagcagtaggtcctgtggaagagagagagagagggaagcgggcgaggtcgggacgaacgaggcaacgaacgtgtgggcgagaggcgcaggcgtcagctcgatgcgctcaggtcggagagggccggtgacgacgctcgacaacgacgacgacgaccagcagagagtaggacgtacgagccggctgtcggctgtgagcgagacgagcaagaggcaaggcgagcagtcagcactttggtcctctcttctgccgcattcctcgcctcggcctagggcagtcatgacccggacgcctcgggtcggagctggctggcgccggcggcagtcgagagcgagcgaggcagactcacatttgagcagaacaggcagagttcctcgaacatggcggccgaggagttaagggagcgagcgcggacaagggcacaccgctttcgctgggcaaaagaaacgaggaaggacaggggtggggtcgtgggttgctgcttactcggcctgggaagaagctgcttgagggctcgggcggcgtcgaccgcgcgcacgccgttgtcgagtttggctggcggcgcagtcccccttgccaggcgcgcctgctggccccgccaaatcttttcctcccctacggccgatggccagcgaaaaaaggcgccccctttcttcgagaaccaggcacaggagcagcttgccgacagcagcagagcggacctgacacgccttcacacgtacgagcacgcgagtcctttcacccacctatacgacgcgccgtccttgcacctcgagctggatctcgagcctctcgctcgctcgctccgccgccctttgcctttcatggtctgctgacccgatgaaagacttacgtcccaaagtctcggcgcgccgtcgtgccggccggccggcggcgaaacgctcggctccgcccgaacccaccgcggccagcctgtcagccaggcccagagcccccgcagccagccagaggcatcgcctctgcaagagaactctgtccagccttcattccataaagtcgactgacccgggccggccgcgacgagccgtcttgcgaagctcttcaaagccggagcagagcgagagcggaaggcactactactcactctgctgacagctcgactgggtcggccgccggaagggggctgttgctgctggcggaacgacaggtgaagggcagcggccgggccgatgggatcgccatttcagcgtggaagcgcgtctcgtgcggccgagctcctatcttctacccgaacggcgagctgcgaggcgacaggcgacagcagcaaggccagcaggacagatggcggcgcctccgcttcactcacccacctccccgcaatgccgccatcgacgaagcacgctcaccgcccttgtacagtgcttcttgcagactccccgtgggcacagtgctcggggctcaccgagggcatcaaggccgatcctcggtcgtcgtctactgttctttacgctgactcgggctgacggcgcgcagcccttcctgcacgagacgtcggtcgctgctgccagggacttgccgttgacttaccgtcgaccatcagtgggccgtgtcgtacaacgccggatggcccacggctgactctgagctgaccgactccgagctgcacctcgccatcgcagcgggagcagcaacagcgcccgccgcccgagcggccgccccaacgagcgccctcctggcggcccaagctgctcgaaggacaactgacggcgctggccttcatcttgcacccggcgcccggcctctgccctcgaagaacaggcgcccgtggctcaagccaatcagagtaaacgtctgcccgtcggccatggttggacaagggaagggcctggacgaccgaccgaccgtttgccagcaggtggtagcacagcatccgaaacgaccgcgcgcctgacctgcctgctcggccggggaggctttgggccgacgtcgactttcgacgaagaggccagccaccagacggcaaaggcgatcgcgtcgggctcgacgatggccgggcgctgaaaggcctttgcttgcagccggaatcaatccgtcgacgggagcaacgacagtcggtcgtccgctctggccgggcccgagcgaagggccctgcttgctggtcatcctctggcggctgaagggctcatcaaacggtcgccgccgacgggtcctgtcagcacgtcgtcgtcccctcttctgatcagcatccgtttgcatattccgaccccccacttcgccggccagtgtaggagcgcagcccatgggcatgagcgaaacgtatcgtcatagccgagggaccgagaagggcagaggagatagcagaggcaagcgaagctgggggcaagagagtgcaggtagaaggcgaaggtgcagaagggcagcagggagtgagagattgtccggagagggaggaaagacgcgaccgggcgcgcacagaagtcgaagtgagaggcaaacagggcagtaggatgaggtcgggcgaggaagttggtcgtacacgaaggcaaaagggcgctgggccggcgagaagggggcaggtggggcagaccgacgaccagcgggtcgaaggggatcagagcaccagcgcgggcgtgagagtgtccgtgcccgaggggatgcgattttgcggccaggtggtgaggacgtccggcagtggtcgtaaggttgaacagagcggtctggcgcgatgcgagcggaaaagagagagagataggtcgtgattgcgggcgagaactgctctgtggcatcagggcgacagcgaccggacgacggccgggctacatgagcatttcctggacgcggatccggtcgccgtagaccttgccctcgcagcctcgagcgagctcgtccggctgcgtgcactcgtccgagccggccgcgcccgtgttgatgaggcttgaccgccggtggacgttggaggacggcgcggccaggggcgagttgagagccgagcgcgacgtgtgccgccagaagtttgtcgggcgaactagaatgcggcatgacaggtaagagagccggtcgtcagcacttgatttgcatagaggaaatgagctgcttggcgagccgatcgcctggcgagggcggacgagcactcacggacgggtgcactcggcgcggcgaggttcgagctgtcaactttgggcagggctagtcgccgccggttcgggctcgtgctgagcgcactggccgcccgtgcaggctcctcgaggaaggctgggctcgtaggcgtcgtcggcgacagcgggccgcgctccgagcccgagccgaacgaggacgccgcgggcgagaggatggcgtcgaatacgcgtcggcctgacgagctggcgcgatttcgctcggctgcgagcacgaggttcgccggtggctcctgcttgttgaagacgggctcggacgcggatcgcggcggtgggaagactggccgattcggtcgagcgaccgatgcgacggtggacgacgccggcttggtaaagtaggacgagaggccggtcgagggctcgtgcgacgcttgagcgaggtcgagctgggctaggctgtgatgcaaggcggccgtgtcgagcgggtcggccgttgccgagcacgcgagcgcttcgtccgagttgcttcgcgacgggcaggtcgagctcgccggcgtcgagaagacggtcgtgtcgtcgtacgagcgaaaggtcgggctgtcgaagcggccaaaggtgtcgggcgaggcgtaggacgtcgtcgacgaggccggcgacgcgaagtcgtcctccggcggcatgttgtttgttgcggccgccttgctcagcagcaccgtgctgacaaacgagtgaaaagggtcgtgctcgtcctcgacggcgtggaaggtcgccggccgggtctgccgcggcgtcgctggcacctggcccgaggacagctgcctcagagggcgttgggcaggccgctgcgaaagctggctactcgacgcgcgtagagggtcgaaggcggccgcgtcgggcggagaggcgtggtcgatcgacgacagcgtccgcgaccgcgacgagagcgggagggagtacatgtcgagagagaaaaagagagagtgggtggggtgagagtgccgggcctgcgggcagtcgtcacgagagagaggagagagtgggctgaggggcttgccgaagaaagagagggggggggtctgcgcgacaggagagaagggcggccggatcgacgggtcagctcgtcggacgcaaacatcttgaggggagagcaggacgcacgcgaacgaggcagagagagcgcagctggtctctggtcgtgatgggtcaagggcaacagaggtgggaggacgagggacacggtcaagagggaggggctggtcgaggtcgagcgccacgcgagtcgcttagtccggcgcgtcgcccgccgctggcgagcgagtcttcgttgaggcagcagcagtcacttgggaagcccttttggtcgcaacttggcgtcaaggcaatcccatcaaatctgaagccgatgcgctgatccatcagggccgcccctggccgcttgcaatggccgggcatccgctctctcctcctgcgctctcctttggcgactggataggatgggcagaacattaagatagaaaaagacaaggactcctccgtgatgctgccgcagagtccgctccgatacgataaccccctcttctagaaccaggtcgacggcttgaaccagctcaggcgagcttccatcgtcgtcgtcgactcaggagccttggcaggctcggcgacgggcgtctcgtccatcggtcggtcgccgtctccaggcggtcggtcgctcccagagccaccgacgtcggctggaagcaggtcgaaaatccggttgagcgcgtcgatgtgcttctgagcctgcgcgcgctcgtccggcgagagggacgccgaggtgggcgggagcttgaagggaaagaattttgcctcgaccggtgccggtgatggggtggcttgagcgatcggcgcagcagttgggatgattgggagcggcgcgatggacgcccttgcctgttggcgtactggcgacgacgaggatggcgcggccgctgaagacgaggacgccgtgacctgcatccgttgcggctgcgattcgagaacgggtagaggggtcagtatggcgctcaagtgaggtgcgttcgacgggagagggcgcggccgcacctgagcacgcgtcggcgtttccctcaacttcttcgcgctgcgctcgtcgccatcaaagctcgcagatgcagcacgagcgcgtgcagttggtgtgccgcctgacgacgacatcacactcttgctcgtcgtgctcgccggcatgagctcccagttgtcgggcagggcgtccgccgacgaccacatcttgacgagatcgcacttgccggtcgtcgggcgatcagaattgaggtggtcgcgcaggtaggccgggaagggcgagccatgctggcagagcggacaagtgaagacgccatccttgcgccagacgcggtagacttagggggggcgacggcggataggtacggtcagcaaggttagacgcgaggtaggacttggcgcgtctcccatgagccaccgccgtccatcaacaccggcacccgagccgcaatgacagcagtccagtgatccaagacactgtaggagcgcgaccggacgcacccttgctgccgacggtgatcagcgtctggtggatgtgggccttccggcgatgggactggacggtgccggtcgtcgggtagtagacgggcggctggcattccgctgggatcgcgacgagtcagatcagcagtgacaaggacacaggcatcaaggcggaagctcggacgtacagcagagccaggagaactcttcagtcttgacagacgaggtgcgcgagccagaggcgactggctgacgggtcagaagaggacgggagagggtccggatcagctcctctgcgcagctcggcaaggaaatgtacaggctagctcttcgaacaagcgccagcggagcgacgcaccgccatgctgagatcctggagagagagagaaagggaagatgggtggcgcttggaggaaaggagtgatgctggcagtctagggcgagggaactcggcaaggcgggaggggcgtgtcggtacgcagcggggttggtcggaggcagaacgacggacgcgacgacgagagctcggagacgcggggacgtccaggtacgtgctttcgacgggcaacggccaggacgaccgagctcgctgctgacattctctgactggcgaggggcgaggtctcatataaccggcgcatctcgcaggcctagtgcgacgaccgtcaagggcgccagagccatgccggccatgccgtcgacgcgcccgtcgtctcgtccccctgcgtctctgcggacgccgccgccgcctccgactcctttgggcgctcctgcccagctggcagacagcggctgaggccgaggagaccattgtggctgattgcgtcgtcgctcatggccttgcgcttgcgcgagccgaccgacgaggtcgtgcggtcgccgccgccgccgtcggacggagccgcgaagacggcttgccgaatgttgagaaggctgatcgggccaggcatagagaagggcggcagcccgactggcgtccttagagcaacgatgtcgtcgcttccgagaggaggtggtgcggccggttgctgactcgctgcggggtcaataaccttggacggcgtgtcggccgaagcgagaggcgcaagcgacggctgagatggcgaggttggcgacgtcggccggaccggcgggctcgacggaccagcggtgttgatgcgccgtccgcaagccgctgccgcttctgagactcgttggcgtcggcagcgtcgttgggcgttggcagatggcaaggctcgtcatgggcgacgatggattcatctcggtaactgacgttggccggttcgtccgccgtcgcccctatgctgacgggcgtgagcaagcttgggtcgatcaggacgtcgccggtggcagaggcagagggagacgacggccatgtggttgggttcgacgaataggccggccgagcagccgggacgacgctgctggacgccagccgctggttgcacgagttgccgaaggaaccgtcttgcaccttgccgctcgtctcgtcagccgcaagcgatagctggcgctcgctccatctggtcggcggcgcagacggtccgacggccggcgccgtacgcgccgctgcgttgacgcttcgggtggcgttgctgggcgttgcgccgaacgacgacccggtcatcggccgcgacgcagcgtcaggagcgttcgagtgacctccgagatggccggctgcttggggcgtagatggagcggtcgatacgatcgtccgatgcgcgggcagagccagctgggaccaagtgtcgcggaacctgcagtgcgaggcacgttgcagatgttgccggaaggtgccggcgttgccggtcttgtaggcgcacgtgttgcagtcgaaggccccgtccttccagtcgacgacaactgaggggtggtgagggcgagtcagcgacagaagatgtcgctcgggagtgccgtgcttggctaggcaactaacccgtgcagtctgggaggtagatcatgcacatttcgacgtggacgatatcattatgcgtttgccaagcccctcttgagaggaagtaggtggccgtcaagcaagatttgcacagcaaagtatgggtcgccgtcttggttggcgaggggtcggagatgtgcaatgggggcctagctcgcttctcgctcctcctggcatgaaagtctgcctcgcccgcgaccttgctcacatcaggcttgacggagcgagagaggcctggagctgccgtgttgagcaatgacggtcgcttggccggtgggccggtggaggggtcaaggggtggaggtgcggaggatgcctgctgcgacaggctcgaggcgagccctggtcaggccttgggtcggcgagctgagagtcggccaaggacggctgcctgcagactcaccgacatcggaccagagacgaacgctgcgagcgagagaggtgaagaaagagctcgcagaggcggagaaaggatggcggtcgtggttgagcggctccgcgacagggctgccgagcgaccgactgaaaggggaggcccgcgcgcccctttcttttccgcgctccgccgggccaggatgcacctctcaacgactcgtcaggcaagatcattgagaaggagagcatgcgagaggtgattgaaaggccaccgccgttcagtcacagagctcagagccagtcgccagggctgccccactcttcgtcctcgtgcgccgttgggccaggggcaaccgaggcgtccgtccggtcctcgtcggcctgctcgtgctgagtgtcgtcggccatcgatgcctcgtccctggctgaggcttcgacctcgacgccgtccatcgctccgtcgtccatcgctctgtcgtccatcgctctgtcgtccatcgctctgtcgtccatcgctccgtcgtcctcctgcggcgccggctcggtcgagggcggacgagagccatggatcatgatgggctccgaggcgttgccttcgctgtcggtcgtggccggtactggggcgaggaggcgagcaaggttggtgacgagtgcctcgatctccttagtgtgctggtcgagaacatcgctggccggtggcgggagcaagaagaccggggcgaggagccgccgaacggtcgcatgctcggccggtgcggtcgacggcagccgacggccagtaatgatgtcacggatgctggaggacagcggcgaagcgggctcctgcggagggtgttcagcccgaatacgctcgatgaggtcacgctcatactcgctgaggttgaaattgggcttgtcgaggtgagtcgagaccacggtcgccgccgcctgcggggtgaaagaggcccggcggatgggcgacgtcgtcaagactggcgaaccgatcatgaccggcggcgacggaacgctgacggccgaggacgtcgacatggcgactggcgactgcgggtaggcgccggcaatcggcgaggtcgcggggacggcgccgaccgacatgctccgggccggcgaaggctggtcgttcaagagcgtccagccggccgggacgccgttggcgaacggccacttgtgcgcgagcgtgcagtggaccgttgccagcaggtgcgtccggtagtgttccgcgttctcaaagcccttgtggcacgacgggcagacgaagcggccatcatccccgcgggagatctggtaggctgcaggcaggaaacattagggtcagcgacgcgctctgggcttgctcgccagcccaggcacacgaaggacgcactctgcccgccaggaactgggacggtagcatgctggctgtgcttgagcgaccggtggtagctgagcgtgcccgatgtcgtaaagtagagcggcgggtcgcacgtcttgcagcggtgcgagtgttcggccgacttggtccgcgacgccttgggcgggagctcgggctcggcctgcacgggcgcaggcagaggcggaagcggcagctgagcgggggcgagaggcgcagcgggagcatcgatcggagcgatagtgcagctcgggcctcgtccgacggccgcgtagaccggctgctgctgattgtaggcggcctggagctgctgctgctggtgcgacggcccgagcggaatgacgcccggcaagatgttggatgcctctggccacgagccctcggacgcgtaggagccgggcgagtcgggccgctgctgctgctgctgctaccgaagatgaggagcgcgttaggagggggtcggagttggcagctcgcgttgccaagtggacgcgacgcgagccaggaggaggttgcggatgcaccgacatgacggggacacaagatgagtaggctggcgagaggtgttggaggagatctgcagaggaaatgcgagaggctagcggtcgaggggtggaggtcaggggttcgagagtcagaagggatgtggccgacgacgtcgctgctgcgcccgccccgaccgccggccgtcatcagtaccagacgctgcacatcccccgccgatgccattgctactcgacgtaacaagccgcaagctcaatccagacgcgctacccaggccttgtcactgtgcggctccatccttgcccagcgcttttcgagcagaaggggccatggatcaggtcgtcaggaggcggagagaccctcgcccgcctcagacgatctcggcgaggttgagcggcatctctgcaagcaggcaagaaagggtcagcgcgacgctcgtgtgtaaggggtcagcaacgcagggacgaaccgtcaatctgggtcgagtagtactgctcgatatcgcgcaggatcttgacgtcgtcgaccgagacaaagttgatcgccacacccttgcggccgaaccggcccgagcgaccgatccggtggaggtagttctcgcggttgatcggcagatcgtagttgatgacaagcgagacctgctggacgtcgatgccgcgcgcccagacgtcggttgtgatgaggacacggctggagagaggagagagacgtcagtgcgcgacttgtcgggcgagcagaggctgcgggagaaggacgcacgacgatccgccgcgaaactcgcccatgatggcctcgcgttccttctggatcatgtcgccgtgcatcgacgagacggtgaagttggcctcgcgcatcttctcggtcagccagtcgaccttgcgcttcgtgttgcagaagatgacggcctgggtgatcgtcagcctgcaggacaagacggagggcggggtcagctgtcgagtcgggcagcgtcgttcgatagttcaaggaagggggcgggggggtacgcacgtgtcgtagagatcgcacagcgtgtcaaatttccaatcctccttctcgacggcgacaaagaactgcttgatgccctcgagcgtcagctcgtcgcgcttgacgaggatccggatcgggtccgtcataaacttggttgtcatctcgagaacgtcgtgcgggagcgtcgccgagatgacgacaacctgcgtcgccggcggcaggtaccggtagatgtcgtagatctggtccttgaagccctggttgaggagctcgtcggcctcgtcgaggacgagcatctttagcgcagtgaggcaacgtcagcacagcgtccatgcagaagcagacgagcagatagtgacagcccgtgcacgtaccttgacgttgcgcgtgcgaaggttgcgccggcgaatcatgtcaaagacacggccgggcgtaccgctgacgacgtgctggccatagtctagcttcttgatgtcctcgccgatgctcgtgccaccgatgcaggcgtggcactggacgttcatgtagtcgccgagggcgagaacgacgctctggatctgggtcgcgagctcgcgcgtcggcgagaggataagggcctgcgtctcgcggatcgaggtgtcgatcgactggagcgtcgagatcgaaaaggtcgctgtctttccggtaccagactgggcctgggcaatgacgtcccggccagagatgatgggcaggatcgcccgctgctggatggccgagggcttctcgaagtctgcgagggcgggggagagcaggcgaggcggtcagccgaggccctcctcaggtcaggaggatgacaagggctgactgtaggcgtagataccgcgaagaaggtcctccttcaggccgagggcgtcgactgcgacgcggcgagcgcgcggaagcaaggcaagaggagaggcgtcgtcgggagaaggcaactcgtcagccatcgcgacgaccgacgctcgaggccgcagtcgcagggtacgcacacgtcggggcctaaaacgagaaagatgggcgagcagacgcaacccggcagagcggggatggtaagccaacccatctttctccgtcgctaggaacgccgtcctctcgctgcttctctctcctcccggctcaacgacgacggctcggacgcgcgcagctttcggccggacgcccggctcgacgagaggctgggggggatcagcaatcaagaggagggcggctcaaatacgtacgactttgaccgtctccgacgactcgaacacctagtatgcgaaagaaaggatgcaggatcagcggaggagctcgagtggccgaggctcgtcggcgcgcggagggagcgaggccggtcgaacgcacaagcttctcgtctcccttgttgatgccctgaggatcagatggaagcgggatcagcaggacatccagaggcttctcccctgctggcgaccacgcacggccatgttgttctgtcttgtgcggaaataagaggtgggttgaggtgaggatagcgagagcgctcggccagccgccctcgagctggctcgagcgtttggaactccgcccctgcgctcacccgaccgactgctctctccgcctggccgcctggtcctcttgctcggcaacgacaaccttcctcctccctcccctctcttactgaggccccgtctcgaagaagacttgttagcgcctgatgcggcccgtacccaatcgcgtgctcggctcgatccggctcatgtcgacctcgaccgtccggccggttgactcgctcgccgcgacgttcggccgcgtcgccaagtcggtcaagcgcgagggcggcgggatcggagcgtcggcgaggccggcgacgagcaaggcctacggaggtgacgacgacggcgacgtcacgcaggccggctcggccgttggcgaggacgctcaggcggtcgaggttttgcccattttcaagtaccacggcaactggggtgttccgaagacgccagtccgtcctctgctctctcgttgcgttcatcgtctagctgcagctgacacctggtttgctctcttctccttgccagggagtgcgccatctcaagatgccctactcgccctggctctggaacggcaagcccttcacgccgctgacgaccgcccagcgcaagaaaggcggccgtgactcgaccggccagatcgtccggtaccacatcggaggcggccacaagcgtcggctgagaaagctcgactttatgcggctcgacgagggcccgcaggacgtcgtccggatcgagtacgaccctggacggtcgtcgcacattgcgctcctccgcaaccggaccggtctcgggcctgacggcggctggagctacattgtagcaccggacggcacgagggcgggcgatgtcgttacgagttaccgctcgggcgtacccaagggtcttgtcccgcagtgggatgccgaggtggccaagtcggacgtcgagggcgttgcccgcgaggccgagaagaagacgctcgaggaccggcgggcaaagtatctcgaggacggcttccgctcgctcgagaggtcgctcgagccactcaggctcgatgacatgccgctgccggcagaggagggtggcgtccgtgatgaggcctcgtttgcggcggccgatgcggtcgaggagcccgtcgtcccgaccaaggaggccttgcctgagctcatccaggttcgggccggcaacagctcgagctcgacggcgtcgccgtcgtcctcgcggtcgttctcgacctcgatcgtgcgcaccgccgatgctgcccctgaggtcagcaagaccaaggccaacggccagccaaagtcgccgtcgatctacgccccgaaagccaatcctaagtggtcgcaggcgacggccggcatcgcgccctcgtttgcgctcaacctcctgcggacactcattatcaagccgggcaacgtcgttcagctgacgctcatcccgctcaacacgtcgattcactgcttgacgctcggccgcgacgagcgggcctcgctctgccgcgcggcgggcacctcggcgacgatcctctcacaccagaagcccgacgagaagggcaacgtctacacgttcgtccggctccagagtggcgaggtccgcaagattcctagtgacgcctttgcaacgatcggccaggtctcaaagtggatccccgagcttgtgctcttttaagcaaagagcttgccaggtcgctgacaccgcccttcctcccccctcgcagcaaattccacggccagcgcaacctcggcaaggccggtcggtcgcgcaacctcggccggcggccgcgggtccgtggtctggccatgaacgcgtacgtccaaggctcgcaccctcaccatcccttcgcctctgctaacccattcctgtctcttggcgcaggttcgagcacccgcacggaggaggtcgcggaaagtcgaagtcgaatacgcacccccgctcgcgctggggctggctcacgcgcggcatccggacgcgcaagccgggcgtcaacggccacaaaaatggaaacaagatgtacgtcggccttgcctcgttgccgggtattgcgtgtcggttgctgacggctggggcttgtcggctgcgcgcggtctagggtggtcaaggagcggccgagagggaaggcgactccggcgacgatggagcgcaagaagtagacgattgcatgcctcgtcccatcatcctcttgccgtcaggcgttctggaaggacttgtgagagaaagagagggacgaatggacttgcccgaggcccggcctcgcgaaggtgacgtcgctcgtcttggagagaccgccaactgccacctgcctctcctctcgccatcgaccgaccgccgctccatccttctcgacctcctcatagagctttcagctagacaatcttctaccactctgcccctgccgatcgcgacgccgccctggccgatggtctcgttccttcgctcgccgctcgccgcatccttcccttcgctgccgccacctcaagcgggcgacagccgaccgacatacgacgtcggctacacggccgtcgcccatccgccgcgccggccgttctcgctcccgctgccgacactcgacggccggccggttctcgaagtcaaggacgtccgatgggtgcgtctctgctcagctcctctggtgctcggagctcgctcgtacctcgcccaggctcctctctcaaccggctgggattgaacctgactgcccttacccgatgcaacactcccagtcgctcttctatccctgcgaggcgcctgcgtcatcggctcaggacggctgcatcccgtgggtcgtcgggccgctggccgcaatcgttcagggctacagccgcttcctcggtaagctcgcgccgctgccacaaatgctgccgctgtcgctcgtgcgtcgtactgacattcgcgctcttgcatcaggaatatctaaagtcatcctgagcgtgtcgtttgccctgctcgtcggcaacccgacgaccgtcttgcccgacctgcaccgcaacgcccggctgcgctcaccaccgagcctaagcccttcggcgtcgagttcgcgctggccgctcctcgtgttctcgcacggccttggaggcgggaagcacgtttactcgcagctctcgcgctactgggcgtcgcgcggctacgttgtcctcgtcctccagcacgctgatggctcaggcccggcgaccattgtccgcaactacgcgacgggcgaggagaccgacctgccctacatccggaacgaggagctctcatggaccgctcctgcggaagagacggtcggagagacgaagctagtcgatgtcgaacctccggcagggacctcgtacgacgacaagattcctctccggcgcgcgcagctcgagatccgccacgccgaggtgtacgaagcgttcgacgcgttcaaggcgatcgtctgcggcgaggccacggaaaagatgctgctcgaggagggactcgcggctagcaactgggaaggcaatgttgacgtcgactcgatctacctcggcggccacaggtgcggtcgtcccctgtccagcgcgttcactcgagaacctgtgctcaccctgtcggcgcccctgtcatcagctttggcggcgctacctcgctccacgtcctatcaaacccgccgccaaaagacctgccgaggcttcctgtccggtcggtcgtcctgctcgatccgtggctcgacccgctgccgccgtcagacgactcaaagctcgccgagaaggacctgccgccctctctcgtcatcaatagcgaaggcttcactctttgggccgaccactttaaacggctcgtcgggatcgagcgccaatggggcggcgatggccagccgcgatcgtgctggggaacgaccatcctccgatccgaccaccaaagcttctccgactttccgttactcctcccttcgctgccgggcctgccattcgcctccaagccggcgacgacgcccgagtcgctcctgacgaccatcatgcgcctctcggaggccttcctcagcaccggctcgccgacggcggccgaagagctcgtcggctggaacggcgcctgcgacgagggagatgtcgcgttcgacgagctgccccggcctcgcaactggcgcggccagcttcaggcgtggcctcaccgtaggatcagcggcggcaaggagggcgacgttcgcgtccactttcgtggcgctggcggaccatagacggatttcagcccgcttgcaatttcgatctcgttagaggtcatgaagagatggtgaacggggcatgcggggagctaagtctgtaacggaggggtcccgcccgggacgagcgtcactcgccatgacgcaggaaggctgtttgaaggcgcccgccgtcgccagcagagagcgatgccgagggcaaccacgccggcgagagcggctcctccaaggaaatagagcccttgagacgaggagagcagcgcaggcaaatgatcgccgtgcttgctctttgcacggcccctgagcgtgacctgtcgccagaggccgctcttgccccgccggtagcccatatccttggccagatccttgagctccggatcctcgatcgccacacgcggatcggcgaggagggctcgcgtgagaagcgcctttgcgatctcgagctgctggctcgccgacgggcgctggacgaccggcccggttgacggcctgtactgcggaggcggcggcggtaaggggccgacgaggtagacgcacgagaagtagaggtagaaccgggcgagcccttgcgggccgccgagccgaaagatgtgggacgggttgatcgctgggtactcctcgtctgatggcgtgaggactggaggcgggaagaagttcaggagcagctggtgtgaagcgagcggcaggtggtcggtcgtgtggacgtgcctgcgcgtgtcggcaggaagaggtcagccaacgacagagagtacaaacgtatacagcgactcacaaaagcatgctaaaggccttctctctcgcgtcgaagccctgatgaacgagctccgacgccaaggcagcaaggctcgttgcgtcgcagtcgggcacgccaggtgcgatctcctgcccgtcaatcccgccgatgatgacgctcccctcccatattcgcggcgtggccttgacgagatagattgtcagaagccgcgtcggcgggtggacagcccttgcttcagaggtgcgggggctgccggcagaagaaagtgaagccggcgcactgccagtcgaggtcgtcgagaaggtcgcggccgaatcttcggacggaggctggataattgacgaggcctccgtgcttggtggagcggtcgatgcgctagcggtatccgtaccatgctccgcagagaggtatcccgagtacgagaggtgcgaggcgcttggcgaggacggctgctcagacgaagggtggcagacgagctcgccttcgtcgctcgtccctccgctatggacccaacctgctgctgagccgaccgacgaggtctcgctcgcgggtcccctgcgactactgctgtggacgccggtggcgaaggtggcaagcgacgaaggtgacgactgcgcgctgggaccgacacgctcgaacgaggacgcctgcgcgaggagtgagccgtcagctggaggcctcttcgattagcagggcagcggcgactgactgatccaggagacggtagacgatgaagaggcgagctaccacgcgcctggccctcgtcggcgttgctctcagaggaagaggactgcgttgtcgatgaccgcgtcgtcgcccgccgagtcttcggcccgcacggccggcgctcaaggtagaaggtcgaggccgccgggatgatgggagcgacgagcttgccctgagaccggggaacggcgggacgataggaggcagccgtaatcagcccgtgcatcgctcaaccaaggcagaaccagcgaggggaagccaaggtggccagtgagcggcgagccgatggcctcgaccggacgcaccttcaggagggaggctgcgcccttgacgccggcgacgatgccatcctggctcagccggagctcgacatcggaggactctgtgttccagggaacctcacaaagaatagtgatctgctacagcggacccgggggatgactgggaggtcagggaaggcgccgagaggagggtgtggatcgacctaccttgtggctctcttggagggtggacgaggacgagcgttgtcaaccggcggtctattccaaacggctagcgtacgcacggtggtacgtgtagggcatttgctccgagctgtccttgctgagaacgagtcggcctagtcggagatgcaggctgatgggcaggaggcgtcgtccctctccgagccgactcgcgccttcctgctgctgcgccgactctcgcgccgcccagtcttcggcccttcggctcgagcgcccgactcaactgctcgtcgtcttgcgcgcaaagcacgtccatgcatctcccagtcatcactcctcatccagcctagccgctgtgctcgacgagcgtcgtgatgagcttgccgccctggacgatgctcttgagctgctcgggcacggcgcgctcgacaaacatgccgtcctcgtcgctcgccgggtccgggagcgagatgttgatcgcgctcgctttggaggtgatgacctcggtcgcaccgtcgaggcactccttcgagaggtagacctggcccgagtcggtcgtgtcgatcgtgatggtcgggcaccggccggtcacctggacggtgaacgacggcgacgacgtgatcgagacggctgagacaacagactcgaacaggaccgacgttttcgagcaggcagctagagaaagggcaggctgatcagcaccacgagcgctcaggacaaggatgaagaggcacgcactgagcgagatggcgttgaccttgcccttgacctgaattaccgagttcttgcagccgtagatcgagacaatctgcttaaggtcgacgtcctcgaggatgatgttgttgttgtcctcctggtactcctattgggtggattgcaggggtcaaatcggtggtcagccgccgcgaagggccaacactctctctactttacagtgcccggacgtacgacaagccacttgttgccctcaagagcgagctttggcggcttcttgccggcgagcgccgccggcttcgtcggccggatcggcttcttcgctgccgcagggacgacggccgccgcccggagctcggggttcttgtgtgtcatctcgctcttgtcgaccttcttgaggcccttggtgacgtcgccgccaagttcggcaaagagactgccggcgccgtttgctgccgacggcgtagagttggccgcagcgggcacggtgaacgacagtgggtcctggccctggcggtcctcggaggtcggtcagcacctcggtggcagcagcacgtaagagcagggcggcatacttttgggttccatgcgacgccggtcgtgtggaacttgacgatatacttcttgagctcctcgagcgctgtgatgaaggtcttgacccactcgccctgcgacttatcactgcatgcgacaacaggtcagcaagctcctcagaagagtcgtcgatcgatgagcacacacctgtccttgaactccttgatgacacggttgccgtagaaagcagccgagtccttcatctcggacacgtgcggcgcaggcttgggctcctatgcgtgtcacaggacggggcaaaggggtcagaacgaggccaggagaccacaagcgaatgtagaacgcacgaccgcgacccagccagctgccgggataccctcggagaccgttgagaggtggttgaattgggggctgcgccggttggcgtccttgatctcgccgacggccgtcaggtgagtgaccatgggcgcgagcagctcgggcagcttgtcagccgctggcttggtgcactgcgatgcccgaacgaggaagtccttctgcgccttaaacagcatttcgacctctttggcctgatttggacgggtgaggaagcctggtgagcgacatccgagaaagccgagcgtcgtgcgagatgagcagcgccgacgggccaacgcacctgctcctggaccacaccaccgacggcctcgctcgccttgaggtaggcgctgaggtgctcatcctgccactcgccaaaggcggtgactgacggactgtcctcgacgggcgcggcagagctgctggcagcagcagcagcaggctgaggcggggcgacctgagcgccgacggtctctccgatggtcgaggtcggctgcttgagcgtgctcgacgacgatctggcgggacggcgaccagatcagcatcgattccgcagccaagcagctgagaagctcactcacgaggtcacagcgaggtcttcgaggcgcgatgtcgccgcctcgagccgcttgatgatggtcgagagattgaagccttgaggaagcagccatcagtctggagccgtccggaaagcgcgcatgctaccctctggccactcaccctgggatccggatgccattgtgagagatcaggaggagcttgtggaggtaggtgaagaggaagatgagatgtggtctagagatgagcccagcccggccgaccggcgcgcctcgcgacctcgtcgacgacccgcgcagcaacgccagtctgccggaccctctcgacctcgacgacatccgacaacccgctcaacccgctctgataaaccagtcagagaggcctgcggtactctcctctcggctgtcgaacctcgtcgccttgcgacccttctcatcggcgggacctcgacaatctcccgtcggccctcccttcggcgagctcggcggttgactcggacacggtcgagctctcgtccgggaacgaccggcaagtcgaagcgcttctgatgctcgagaagaggacggctcgagctcaaggctgtcgagctcgcagaggacccaaccgcaggaggtcggatgctgcgtcctctgtcttccggtcccggacgaccctcccccggccgcggtgcgtcgtcgtctccctcccagcctctgcttcaggacggacgacacttcggtggctacgaggaacgtccaatgcgtacgagcattgatctcaccctccagctcgtgcggtttacaaaccctcccgtcatccacctttcgaccccgattagcgcctcacgctgcacgggactacacccgccgaccggtcgttccctcaaccctgtgtctgacgagctcgacgacgcactggcaccgccgctctggcgccacgctgggtcttgtctcgctgatgtcgactgatagtagaggttgcctaggccgggagcagcaggctgagcgcgtgaagagtgccggcacgcggagccgccctcaagtctctctcacttgacgcacaacctccgacattgcggttcggcctggcggatgctgacccttgtcggtctcgcgaacgcgcaaggcagtcagtcaaccatcagctcacaaccgaaggaaggggtgggcgtcagcgaggaaggaaccactttggaaagcccttcgcttgcttgcgctgccgatggccgatggctcgatcagctgctgaccttcccgtccgcacggctcgcgcgtctttcgcgcgcccagccatgtcctcgtcgcacgccttgtcggagcagcggagctcatcctcactctcgggcggccgactgaccgtgtttggcaggcgccctcgacctgcgctggctgccagcccagtcgccgagttcgggacggctcgttgtcgtcggggctgcaagaggcggggctgcttgggggctacgctgcatggtcgtcgggggctgtcgagacaagttaggacgaccgacgggcttcgggcacatcagcggccgggggagatgcggttgggcgtcgagcagacggagcagggtcgctcatggggagggcgtctgcctctccacgcaggccggcgttagcgagcgactctcggggagaggacgtctttcgctacctccgaacagtcggctctctcgcgcgcgacgaggcgcccttctcattcgtcggtcgggttcgacatcgtcgttggccgtcatggcgggggcgctcaacgagtcaatttggaatagcagcgagctgcggagcgcccgtttctggcgggtgcatcgtcccacgcggcgcggccgaggctctgctgactgcggtcgaagcatctcgtcggaagacgggctcgcccgttccttcgttcgttcggtcggacaagggagcagctcgaccccttgcgcacggccctttgaaacgaggcttttttcttgcccttgttcgcctctcgtctgccccttgcgacggttccggcctcgcccttccgtcgtttcggtggctgaacaaattcggtggctcaaggtctcggccgctggcgatcggccttttgtctgtgctgatcgacccctttctccctcagcccgccggccgcccgactcgcccaccgcgctcgccttttgctcggtctccctttgagcgcgggacggccatcaaagggagggagggcgagaacgccctgccctcccgagccctcttctcccccatcaagcccggccgtcccccgcgccgacgctgtggcctcgagccgacgcctctcgcgtccgtccccttcatcaacgacctttgcgaaacccggaggcgcatgcggccgctgcctcttcttcgtcgacgacttctttctctttcagctgccgtgtcgtccttcccttcctcccgccaacgacttccgacgcccacgccgccgccgcgcccgcagacggactccacgggccaacctcgccgcgcccgatccccccgaccgtcgaccgcctgcctcttccgccgcccgccatgtcgatgtcgccttcgtcctctgggtcgacggccgtcccgtcgaaagggtcgtcaccgcggacgcgccggcggcgcgacgacgcaaaaagtccgccgcgccccgccgacgaggcaacaagctgcagctctttccgtcggtcctcggccggcccgcttgtcggctcgcaggctccagagccgacgccgcgcatcgccattcctacctcttcgtcgagacggaccctctccgcagccagcggcggcagtcggagccagaccgacagcccgttcacggttacggtcagcagcttcgacgacggctcgcagccggctcacgccagcagctcgcccgagctcgtgccgctcgcctcgtcatcctgctcgtcgagctcgtccgtgaagggcttgacgaccgccttttcaaacgtcgacgtcgacacgagttttggatcaacgacctcgtcgcccaacgtcactaagggcgtctttcagccgccgccgcagccgggcattcatgcaccgcccaagaagaacacgcactcgaagccggcgccccagggccacgtccctcggccgcgcaatccttacatcctctaccggatggacgtcgtcgcgcgcgggctcatccagggcgagaggaagcaccaaaacattagcaaggtcgtctccgagatgtggaacgctgtgcgtgtgccctttttcgctgccgcaggctcgaaagacgctcagcccgagcatccgagctagctcgacaccctcgcgcatctgagctgacactttcgcccttccgccacagctgacaaccgaggagaaggcgccctacgttgccgctgcgcatctcgagaagatggagcacaagcgcctgtccgtctgccttcacccgtcttgccttcgttgtcgcccgagctgacgtcgctgccccgtcgctgcccggctctcgttcagctaccccaactacatctaccagcccggcaccgatcggcccaagccggccaaggccccgcgcgtgcacaagggcagcaaggcagccagcacaaaggccgctgctgccgccgcggacaagaaagggtcgtcatccgccagcaaaaagggcaagggccggcaggacgctgcccagcgtcaagccgccaaggagctcgatgaggccgtcgaggaggacagcgactatcagccgtgcgtgcgacgtcttctgctgccctttgctaagccctcgtctgacgactctatgcttggccctccttccaggaccaagcggcgatcgacctcaatcaagaagtcgtcgcgaagccctcgaccgtcgccgccctcccggacgtcatcgtcaacctcgtcctttgccggcagctcttggccagacgaaggctgggacagccaggccgagtacgagcagcacggccgcaaacggcgcagcaagcaggagtcgtacgacgcttttgacggctcgggcagtcctgccctctcagtgtctagtcgttcggtcggctccgaggtgtcgtccgacgttcgcggctccaccagcggctcctcgatctacaacgacgacgacaggctcggcgctcatcagggagagcacggctttcacatctcctatccgccggcgggcggtcctcggccagcccaggcccacggccatccccaccagacgtacgccccgcactacgacctcgcgccccaggtcgtctacggcccaactcaatcgatgctgccgccgcactacggtccaccgttgacccaacccatgcactcccaattctactactcgccctacccaaagtaccatctgccacaggacatgcgctacacccagccgccggctggcccacagccgggtcgcatggggcagaccagctttcctccgacgccgccgcaccctctgcagcctgccgagcagcatctcggtccgtcaccctaccgtcaattcgagtatcagcagttcctgccgacggccgagccatcacccatcacgcccggcttccctgcctttggccagcgccgaggatcagccaacaccggcctcgccccgggtcctccgcggcgcgagagcgctggcttcggcctcggcttccaggaggacgagacccctcggacggctgccttccgcgaagctttcatccctcgctcgccggcctttggctctccagcacaaacggctcctaccgacccaagctcggcgacgaccccagccgcaccgagctttccgtccgagcggcccgtgtcggacacgacggcgcagcgcggtcgctctcgcaacgccggcccgctgaccgaactctttacgagggaggccctccgtccgcagacttttcctcgggcgacgtccgaatcgtccatccgccaaagctggcacatgggtgaccaggagatgtttgtcgccccgccaccggcgcacttgcctcggcaaccggacgccctggcccatcagcaacagcagcagctcctgcagcagcaaggccctccgacgagccactttgcgcagccgatccagcggtcgaccgagatggcggccgtcccggcgtacccgaccgcaggcggtccaggtgccgccggcctcgatttgtccaaccggcgcaaaggccggccgcagccgctcgcattccccgccccacagccgggtgtcgctcagccccagcagccttacttccggtccctgccggccgagcttgcaccctacggccatcatcgtcccccggatctgcacgtaacgccgacgcaggaccagtttacgtcggccgagtactacacagtcccctttgacgagggcccagcttggacgctcgagcctagcggccttccagcgcacccgccgccgccaccacagcatcaaccaggcgctggcggtccccggtaccagtagcaccaaccttgccatctcttcgcaacctctaccccttctcctcatgcaacctctgccagcatctatatttcgccttggcctgctgctcatcatctcgcctttgctttctcccgccgcaactgcctgtggtctgctcctgtatttctcttgcacctcgcaccatccgccccctcgcatgtaccatcggcctcttgcgcccctcgcagccactcttactcttgcttattgcccttcccgcgccttcctgcactgtctgtccataacgtgaggcgcgctatcacaagcgccgcccacacgcctcgcatgaaatatcgtctgctccttcttctggaccgtcaagagtcgcgcctgtcacagagagcaccaagagcaagtgggctggatgagcatgagatctagtcgctgaccgccggcggcgcgacctccaggcccatgttgagcattcccatctttttgatggtcagcttgggcagcggggggacttgagaagcccgagcgcgccgacggcgtactccttgctaagggcgacggctcgagccttgtccttgacatggcctttatagtacccaaggtcggcagaggccgcgctgtcccggatcttgaggtcgacgtggcccatggcctttttgacgatggccgagagctcctttacattggtcggagcgcgcgcgtcctcgatctgaaattcctcagctctttccggccaaggaaaagccgctcgtccggggtcagaatgagggcaccacggccgtccttgccggcgcgagctgtgcggccgagccgatggatgtactgctcggggtcggccgggacgccgacctggaggacgagactaatgaagggttagtccttgcctcgcgccgtgacgtccgacgagaaaaggatgcccttctggcacttcttgaactcggccgaggccttctcacgggccggctggttcattcgcctgaccggacggttggcgcgagcgatcagctcctgaccgcggacagagaagtggttggaaacacacgagtggatctggaataccggaatgacgtcgaagccagccgtgaacgccgcgtagaagacggccgcgccgcgggccgtcgggcaaaagacaatgactttgtacgactctgggtcgcgctgcatctcctcagcaatgacggcgagggaggcgccgtagatgtctggccagccgacgactgccgcctgctgcgccacgtgacggtgcatgttgtcctcctcgggcgggatcgacgagaggtacgcgtacccgggcaggagcgcgagcgagacgaccgaggtgagcctcgagggaaccgtcgccgaaaagaggagcgtctgccgcggatggagagtccggtcgggaagggccttgcagatcttcatgctgtcgggcttgattccagcgtcgagtagtcggtctctctcgtcgagaatgagttgcttgataccacgcaaggggtcaccgagcccatctgcagagaggccagaagtcagcggagaaagagggacgttgattgcgcaagcgaggagacgtcgagctcgagactcacagttggcgatgaggtcgttgagccgaccaggcgtgccgaccagaatgtcacagccacttttgagagccgccacgccgcggttgactctggtcgctccaaagaccgcgttaatgccagtgccagccggtgcgagggtgcgggcctccgccgcaatctggctcgcaagctcgcgcgtcagcgagacgatcaggcacgagacgtggccgtgcagatggggtggtgatttgtggatagcgttgagcgtcggaatgaggaaggcggccgtcttgccggtaccagtcttagcctgcgaaggaagacaaaggggaaggcggtaagcagcccgcgcgctcgagccgcagcacgctcagggggcagcaccgacctgggccaggatgtcttgacctgtgagcgcgaccggaagcgtgagcgcctgaatcgcgctgcatgacgggtgcttgattcgagcgagcacgtccgaatggagattgaaagtcggcgaaccgagaggacggggtcgtactctggtcgacggtggccacgtctcgccgagcggaggaaagagcaatcgaccgggtggcggccgggagtcggacagccgatgctacgctgccgaaacgaggcgaggcctgcggtagcaaccggaggagccgcagaggtagccgagagaaggtcatgacgaaaggatgaggggtggcggagcagcgtcctcggccggttcgccggcgtcgaatgttgggggggggggtcaggtcggaggcagagcggcgcgtccgccgagagaggtcgccctgtcgagctgacccggccggcctctcgccgctggaggctcgagtagggcagccgacgagagtgggtacacccgctcaggctggtacgctcctgcttcgagcggcgagcagaagacgattctagagtctcgccgcggcgaggtcgggcccttgttaccttctcgcgcgcgctcttccgcggcagacgcgtcgaaaccggcggcgcgcgcgctgccgtctttttcaagctcgtgcctctgtcccttcgaccttcaaccctcctcccttcaagccctcagttcagccgtctcgtcatggctgtctcgcactcggtccccgtcgccaagggcgtcgtcgcaccggcccacctgcccgccgagggctcggccgcgttcaacaactggcactacattgcgctcgtcctgctcgcgcccaagctgcttcagtggacgttccccttcctcgccggctcgcggaccatctacatggtcctcctcgtcctcctcttcctcccgatcaccatcttctactggtgggcctcgtccaactatggcgcccggctcaacgacaaggtccggctgcccggcaagccgatcggcgagtacctcgatttcaaggacgaggagctccgcaagcagtacctcggccgcaagattccttaccaggttctccacgacgcctactttgacgacagggtcgccttcaagggtgcgtcttgctttccctgtgcagcgcgggaagggcaggccgctgacagacggccctgctgctcgtccttcttgctcctccttttcccctcccttgccgccctcgctgccgcttcaacaggcgacgtcctcgaggtgctcgagtaccggcacgactttgtctcgttcaacctcacgcccgacttcttcaagtacatcttcttcaccttcttccccgaggttgccatgcacacccagaaccaggacctgagccaggtccgcgagcactacgaccggggtgcgcatctccctttcatcctcaccgctggcgacgtctagctgaccagctcgcgtccttcctccctcgtaggcgacgacttctactcgtggttcctcggcccgcgcatgatctacacctcgggcgtcatccgcgacctgacccgacccgagacgctcgaggagctccaggacaacaagctcaaactcgtctgcgagaagctcgacctccagccgaacgacaccctgctcgacattggctgcggatggggcacgctcagcgcctttgccgccgccaactatggctgcgacgtcaccgggggtgcgtcctgccggctgccatcgcccccgtgctctcggcctccgctgacaagtcgcgcgccgcagtcaccctctctgagaaccaggccaagttcggcacggaccgcatgcgcaagaacggcgtcgccgaggacaagggccgcgtcctctgctgcgactaccgcgacatcccggccggcaagacgttctcaaagattgtcacgctcgaaatggccgagcacgtcggcgtccgcaagtactcgaacttcctccagcaggtctacgacctcctcgacgacgatggcacgctcgtcttccaggttgccggcatccggccccgctggcagtttgaggacatcctctggggcatcttcgtcagtcgccgctctcagtcttttgactgcggccctcagccgctgacgtccaccctgattgcgcctctcgtagatgaacaagtacgtcttccccggcgcggacgcctcaatcccgctcaactgggtccttaaggagctcgagaaggtcggcttcgaggccaagcagatcgacgttctcggcgtccactactcggccaccctccaccggtggtaccaggtgcgggacccccttcccttcgaagccttcccggcggcttgctcagaagctgacctggttctgtctttcttagaactggctctcgaacgaggagaaggtcctcgccaagtacggctcgcgctggttccgcatctggtcgttcttcctcgcgtcggcgaccatcgtctcgcgccagggcggcgcctccgtcttccagctcacgctccacaagaacacaaacggctttgaccgcgcccagggtatcgccagccacgtcggcacccgctacaccgataacaaggagtggaagtgcgtcgaaagctccggtttctcccgcaccgccggttgctgcgagctgacataagacgctgtatcctcctactcaggctcatcgaataagctcgacccgcgcgagcgacgtagacagggaccggcaatgcgctggccggtcgctgacaaaagggacacacgcgcctgcgggcctctggctgctctatatgaggtcctgctgcagtccgtcgagtcggggcgttcgttcgaaaagcaaaaagacgatggatacaacgcggagcagcaattacagcgcgggcaggggagaaacacgagatgagatgggagcacaagggagatcggcgcagagctagtggaggcggcgaaggccctcgagaaggctgcagaggtcgccgtaggccatctcgatcttctcccacttgctcgcgccttccatgatctcaaggatgacatcctcgtccttgatgtcgaggaatgtctcgataaagtcgccgtcgatgaagccggcgctcggccgcgagccgacgtcggaacggtatgcgcgccagtcggcatgctcaacgccgccgaagccacggacgaggggagccatgttgcgctggagatcaaagagcgtgtgcgaagtctcagggccaagcaggttggcgaggaccgagactcggccggacgacgctgcaaagaccagattggccgacgcgtgcgaatcctgctgctgctgctgctgctgaggtcgtagggagcctgcagaacgggacgtgctcgtcagtttaccgaatcgagatgtaaaactgcgatcagcgactgacccttgcggaattgattgacaatgtcaccgagatggattgcaccgccagtctcgagttgcccgtcggccagcttgaacgttgaaagattgcagccgacctgcagagtggagcgagtgatggatcaggaccgactgagggaaaagttgcggtaaggctggggggacgcacgtctgcgctgacgaaattggtgtcgctgatggtcccgactgaggtgagccaaagcggcttcaggtcctgccgatatgaagcgaaccaaatcaacttgcgaagcaaagggacaggtctcgctcgtaacagaagcccacctttgcgaccgtcaggaggtccgagtcgaggttcgactcgatgagagcgagcgaactcatggcgtcgccaacgagcagctgcgactcgccgacttgtgcaagactggccggcaggtaggccgaagcccattgcgagcgacgcaggatccgtgggtttgggccaaccgagtcgaaggccgggtcaagcgaaaagaggatgacctgccgcagcgcaagcagacaaagctcgtcagcagcgacagagaaggagcacgatttgaccaggcagactcactctcgagttgacggtcgcagcgaagccatcctgagcgagctgcgcgaaggcgtacaccatgccggcaacatcgatggcgcgcgacatgtggagcttgccgtcactgccgacgttgagcagcaggatccggccccgctggacctctgattggtccggctgcagcatcgccgtgccgagaagaaagacgggaagtgactcgccgccgaccttgctccgcaaatgaacgagctcgagggccgtcgctcgctcgccggcctcaagctcgtgcgagaagaccggccggaagtcgtcgtcgagcaacttgaagcttgacgagagaacctcttcctcacggaagcgatcaatctcgctcttgatgaaggcaacgccgtacgagcgcagctccgggtggaacgcgatcctgtacggcgagtcggcgccgaaggggatctgcagagcgagatggcagcgcaccgtcagcaagtgagcgtcgagcgagcgcaaaagacaaagcctcaccgtctgaatctgcgtcttctttgtattgtcgagacgtcctaggatgaggctgtcgggcgtgacaagcaagagcagcgggctcgctccgccaaggtcgaccgagcaggccgaggtgacgtccttgacgctcacatactggtagccgactcggccacgggcttccagctgcaggacggcaggtcggtcgcagcttgccaggacggagccgccgacagaaagcatcagctgaacctcggtcgaaccgagattgagcttgcggacatcgctgccctcgaggacagaaccgtcggccgagagtagactgacgacgacattgccgtcgcccagcccagcaaagaggcccagttgctgctcagctttggggttggcagcaaagaggagggacctcgccagggtcggcgtcgggggcagggtcaatacggtgtcgagcgcgttcctggcgagatcaaacgtcagaagggagagatcccagagggcgaccgcagccttggcggccgaaatggtgacggcgctaatctcacagggcagctgtcgggtgctgaacgaagcaaaacaaggatatgttagctgccaggccctccattcacaagcgaagattgttgcacaaacccgacgacgacaaggccctctatcgaggcgcgcaaaagcacgaggcaaccgccgctgaggccgagcaggacgaggccatccgacgacgaggccgcgacaccgatttcctctcgtgctccttccggcttccactcgctgcggttgcctgtcgaggcgtcgacaagcaagacgccctccttggtaacctggacgatagcggggcccagcgagccgacgtgaattgatggccgctggtcgagaccgctgttggccgatgcagggaagactgacaccatcggagcggaaggagcttcggccatcccatcgtccgtggacgaaaggagaaggaggtgagttgccgaactcgtgctggcgacgagcaagacctcgccggcggctactgagctactggtcggcgagcgcatcgaccagatccgctcgacgcccgagacgccttcgatcgcgagcacctgctcccacccggcgccgttgcgaacgacacgaaggctgccagcgccgttgccgccagagcaggtgacaacctcgccctcgccctcggctgagacgcagaagtcgaggatgggagcaaggttgtcgaaggacgccgagggcggcgcaaggtacgtgccgacgtaagggatcggcgagggcaggatcgagacgacgaccgagttcgcaaaatgcgagccgacgaagacgtgcgaggacgtcaggtaggtcaaacactttgctggcgacgtctgtggacgagcggaagacatcatcagttttaaaagcgtccttgccctggacaagccatcgacgtaccatgcccaggacgatgacgtcgaccgactcgatgcgtcccgagcgcccgcgcttcaacagggcgagcttgagctgaccgtacgagtcgcccaggagcacacgtgcgccagaccggtccgagtcgacgacctcccacgccgtcacctcggagaacgctatcttgccgacgacggcaacggctcggccgaacgagttgctaccgctcgcctgcggctcgtcgtcctcctcgtcgagccgaggcaccttgcttgccccatcccgcctgatgaagctcgatgacgctgtgctactggcggcgctgcttcgccggcgcttgccgctgccggaggacgccaaacccggtccagcccctccgcttccagagtcggcacggctcttgcctttgccaggcgtccctcgggtagaaggctggcgcgggccgagatcgtagaccgtcaaggccttctcgccaacgacgaggatcgcaccgctgccgccttcctcgccagaggggatcggtacgagcagcccggccgactcatccggcacgtgcagcgcaagccggtccgtctcctccgatagaggcgcgaggtccttggcagcgagatcgagctcgcgcacgcgtagatgcgggtcgcgcgtcggcgtgagcgtcaaaaaggcgagcgatgggttcgatggaccgtcgatggacgagggcgcaaagacgagggcgagcaggttgagatcacgcagtctgtcggtaaggaagatacgtcagtcaatgtgctgacggatcgagaagccaacctcaggcataattgcgcactggacatcgaacttgctcttaacgagcccttgctgaacggcagccttaccgcgccgcggccgagccttaccatccgtcacagccgcctccgccgcaggctcggccaggacgacgacgctgagcgagccgcaccagatgccagcggcaaccgtcccgctcggccggtcgacgacgagcccctgccagaactcgttttcgcgcgcgccgaccggccgcgagagctcgatgcgctcgccaacggcgagcgtgccgctgtcggctgaccagcagcaaactagcagcaaaggcttcaacggcgcgtcgagcaggacgagcaggtacgccagcttctgctggccggcttcgatgtcgacaccgatgtcggagctcgtcgtgtgggcggcagcagtgcccgatggaggtggcgaccagacctctgcgccgatgacccgcccccagagctcgacaggcttgcagacctcgaccgggcccgagggtagaaggtcaaagagcgcgatcgagctcggcctgacgatagcaagcgagtcgtgcgcagacgaggtgaagcggccgcggaccgagtgcgagacggtcgtcggcgggtgggcctggcagggaggtggaggcggcgacgagctgtcagtgaggatcggctgcagcagcagcaacgcaggcgatcgcgtactgtgacgaggtactccatggcaggtctctcggacagaaaccggtccgtctgatcgagacagggcttgtatcggaatgggacggaggcaggagatgggggaagtcagcgggcaggccgacgccggcttatgcattgtcgcttctccaaacgccgttgttcaatggccgaccgcctattacttattgtataagaagggtggaactcgacctctttcgcttcttctccttctaccaccaccagctacacccttcctgctctcctaggtctgtcttcgagctcagggcgcaacgaggcaggctctggctaaccgtctcttgcccgcctgcgcgccaaatccgcctcctccccccccctccacctctcagagcccgacccctcgacgacattccgacctgcatcaccgcccaaccctttccgacagacaatctacttcacttagtacaagatgtgcatgcgtactgcctgtgactcttgcggactcgcctcgtggcgcggctgcggtgcgtctcgccctcgaacccaccgccaggggaatccgcagctgaccgaccgaccctcctccttcgcccgggcgcacctccctcctctcttcacccgcccaggcaagcacattgactcggcccttgccggcgtccccgaggaggagcgctgctcgggctggcaggagggcaagtgtgccggcccccggatggcagtcgctgcggcgggcaaggaccagagcaaggcctgaggtgcgtgcctgctcctgcgacgaagagaggggggcggccaatggcttgacgactggatgaatgcgtcgattgctcgagtgtatatccagactcccctgcaagctctgccctgaacgccactcgagcaagcaagaaccgagcaagcattcgacctctgacctcggccgggctgctcttaccccggtcgatcgtctcgctcgcacccgtacgcgcgagactgttcccctccgcctcctcctcccatccctcaccttcccagcctcttctttccctcttttgccgcccatctccctcgccctcgccagaaagtcttgtccgaggcttcgccacttggccggcaagcctcgcgtctcgtaacgctctgtcctgcggcaggtcctgccagtctttcctgcggcctgtcgagccttggccgacgaccccgcttgcccccggcccgcccgcccgcccgtcggaccgcggaaacccacgactacctctcagacggtcgacctgatcagcaggacgagcttcagggctttttggctttccagtagtcttcgtgcgcttcgccgccaacctcccttcctctcgccgttgcacccaggcgagctcgatctcagacccgcattccgaccgcctccggcctccgaatggaccaggccgccttcacccacatcccgcctcagcacgggctggcccagcggccaacccctgctccgtaccagcagccgcatgctggcccatcgcagtaccagctccccgaccgggcttctcggccggcgcactcggtcgagcacgggccggcgcctgcggcctcgggctccgcagcgagcctcgcgcccgggacccgacccgcccgctcgcgtcgccagaggccgtgcgactcgtgtcgaacggccaagcggcgttgcttcaaggacgaccaccggccgtgcgtcgcttgccaggccggcgggacggcctgcacatttcttgagccgccgcacaagcgctcgcgactcgctacggccggcgccgacggcgcggggagtgcgagcgagggcggcgccggcgagaagggccgcaagacgagcgccaacggcgccggcaagagcaggaagcggcccgcgccagaggatgcggtcggagaggacgaggacgacgaggacgaggaagaggacgacggccatcgctcggccggtagtgccggccctggcccgcggacgcagcggatggcgctcgagcaggtcctcaacgccgacctgaacgccggcggcagcagtcagtcgcggagggctaacgtcggtccgttgcagagccagacaggcctacctgcagaggacgtagcgaacgacccgagggtcatggtgcgtccgttgtcgatcccggcggagttccgccacctgctgacttctgtttgtggctgcccagatgccgacgtaccccgctgcgtccttcgcgcagggtccacttgcacggattctcaaccgagctcgcgttggcggacccgactacgatcagtccgagcgcagcacgtcccaccaggagggctcgctccggcagggccagtctgtgaggcgccgtgcctgcttcattctcggttcttgagatctcgcgctgacagccgtctcctcttgcgcccgccagcccccggccgaagaatcggatctctcgcatccgggcctcgaccactctcgcttggccgcatccgagccccacttttcggctgcctcagccgccgaagatccgtcgcttaattttgtcacgtcgcgtgtccgagaggtggccagcactcagggcgccggcgccggcaacaacaagatcttcttcgtctcgaccccgagcttgatctatccgaaacgaggtccgggtgccgcgcctgacccgagcggtggcatcgcgccactcatccggtctctcgagctgcttggcaaggagcaccctgagattctgcttgaaacgtctggcccgcctgatgctctcatcgccgcaggacaagctgacgtctcctgtcttcttgctgccagcttcgtcaacatcaccctgcccgcaatccccatcctcaaccagaaccgcttctaccatcacctgcggtcttacccgctctcggagtcgctctacccttcgcgcatcctgaccggcatcctcgcccactcgatcatgtacaacccggagctgcgcgccaagcagactgaggtttgggtcgaggtctacgagacgctcacttacgagtgcgtccggccctgccagcgccgcaccagttcgcgcttgctaacaagctgcggctctctcgttggacagattcctccagccgcgactgcagacgatccagctgacgctgctcgacctcatctcgcggccggacaagaatccgggaggcaactcgatcgctctcgcaagggtgcggcgccctctcgcatccctgttcgctgctttggccgtagcgtacgactcctaatcactctcgttccgccaggctgtcggcgctgctcagctactcggactccatctcgactgcagcacctggcagctgccgcgctgggagaagaaccttcgcaagcggctcttctggctgctgttcgtgatggacaagtggtcgtcgctgtaccaaggccggcccccaaacattcactcatcgcagtgtgagtcgcctgcccgagttcctttcctccttgtgctggctctgacaagctcaagaccgggttcgtgtgcgacagacaacgtgccctttcttacgctcgacgactttgactcgccgcacgggccgtcaacgccggcagcgacggcttcgccctcgcacgcgttctcgccggcgtcctcgcagcacaacggctcgaccatgacacagacggcgattgactcggcccactcgtttatcgcactcacaaagctctcggccatcgtcgaggagctgacggaggagttcttctcggtcaaagcgcagaacctcggcgcgacgtcggcgcggatccgagcgagccgggcaggccggcagcagaagctccgcgtcattgaaagcttcggagccgatcttgacaagtttcaaaacgagttgcccggccgcctcagcctcgactaccagtatccgccgggcgagtgccccgcgaccggcatcagtgcgtgccagctcgatcgcgttcgagagtccgcgactgctgacgtgtcctttcttcctgtagagtcgatgcagctctcgtacctcggcctcacgatcgccctcggccggctgacgggcgacctgttcgacatcctcgatgaggagggcgactttgaggcgccgctgtcggccggtctcgacctgacggaccaggtcgttcagtttctcgagcgcctgacgccgaccgacttgacggccgtgttttggatctcgttcacgccctaccagtgagtgatccttggcgcgcctggttgatatttagcgtgtctgacagcgcctcaccccgcttcgctcagtctgagcaacgccatgtcgctcctcatccgttgcctgctagcgtgccgccggatcggtcacacgccgctcctcgtcaaggccatcggcctgctccggcggttcatcgtcgtccttaaggagcaccatcggccgccaatttgctgggatcttgcagagcgggcgctcgccaagctgctctcgctcatgccctcggtctcccgtgagttggttccggcgaccctgtgtacctttcttcccggtctctgacggccactttgcccccaaaggcctttgccccgaggtcggccagatctgggccgagcacgcagacgagatctgggcgcagatgcgagcttcccctacggcagaggtcctcgtctcgtcgatcccgaacggtagccaccacgggccagcaattgttccacccatgccgccgccggcagcagggcataacggcgccttcatcccgccgccgccggcgcagaatccctcgctgtcgatgagggcgccgtcgcatccggccaactaccacgacctgccaggccggaagccgctgcaggccggcaccaacggctcgcccgcctcgcacagccagcggcagccaatctttgagaagccggaggacgtcgagcagtactttagtgcgtcgtcgagcctcagatctcgctcaggtgttgcccgctgacgtccgactcttctgtcaggctccatcctcaacaacccggtgacctatcaggccgttcacggccttcagagtccggccggcttcccgtacgccgccggtcacccggccatctcgcgcctcgcgtcggccggccaccttggcgtgccaaacgaccgggccttcccgtcgaccgacgagctctcgttcgagacgccgttcgaggtggccgtaggcgaggaggacgtgtgggcttctctcggcgacgtcgagggcttttcgtggatgggcgaccttgcttcgcacgagaggccgcttccttaaccatgcctattcctgatactagtgagggagagacgacctcagctgccttttttccgtccaaagtgcccgactctctgcggaaacgcctccctttgtcactcacctcgttgacgccgacgtcggttcggaggcaggcgacagagcgacgaggcctcggcccttgccctccccttcacctgcacctggtcccgccctccatgagcatcaaaagcctttctcgagcgatcttcctttccttctctctaccttcacctcagagacgctaaacggatgcggcttctcctcccttcctcggtcgtcctcggcgcggtcgccctgctcagcccatcggccgtcgccggccagcttcagccctcgccggcgtacaccccgccggatgcgacctcgggcgacgcctcgtcgaacctcgcggcgagcgagcagtggtcgaacctgctcggtaatactctctggttctacgaggctcagaggtctggcaagctgccggagtcgaaccgcgtgccctggcggaacgacagcttgctcgatgacggtgaagacgtcggcttggatttgtcaggaggctaccacgatggcggagactacttgaaggcaacttatccgctctcgctcgtcctagcatcgatctcttgggccggagtcgactatggcgccgcgttcgagcagtcgaggcagacggcctatctcgacggcacccgtgcgtcactggagcgctgccctaccagtccgctgcctcgaatgaccgacgccttccggaccctcttcagtgcgctgggggcttgactggctcatcaaagcgcacccggagccttccgtgctttacgtccaggtcggcaactcgacgggcaacgagtaagagcgccgtcgcatctcatctcgcactgcctgcgtatcgcgcctgtcttctgatcgccgatgcctctctcgaccccgctcatagctactggggaggggaccgcagcgttcccggcccccggacgtcgtacaagattgacgccgacaagccgggcacggacgttgccgcctcgaccgcagcctcgtttgcctcggccgcccttctctactcgttcgttttgcgggcctgaacggtgctgcgcgtcgacccgtcgacaggcctgctccgcactgacactcttgctctcgctcaacagaggccagacgctcggcacctcgagcggcaacaactcgatctcgctcgccaacgcgagctacgcgacgatgctcctgacccacgcgacgcagctatacgactccgcgaaaacgagcccgatgcaggtctatcagacgagcgttcctgcggccgccgacatttacggcagcagccgcttcgccgacagcctcgtctgggctgcgctctgggtgagtctggcgcttaagcgttcaagaggagagcacgtttcggaatgctgacgcgaatcacgactagctctctgtcgcgaccaactcgtcgagctatcttaccgacgcctcaaacttctacgccagctacaaactgtccggatcatcgaaggtcctcaactgggcatcgaaagtccctgccctgcccgtcctcgcctaccagattgttcagagccggccgtggctcgtcgccgcaggtgcggccggtccctccttctggcaggccgaggccgagaaggtcctcgactcgatcgcggcgaatgaccagctatccggtggtctcctctgggtgcgtctgtcccttggcactttctcgagtctgcggtctggctgattgctttgactacttggctttgacggccgcagttcgagggcgactctaacagcgggtcgctcaatccggccttgaactccgcccagctacttttccggtacgcgccaatggcgacgacctcagatcgaacgagccggtatcaggtctgatccgcctgatgcatggctgtgagcgggcaagccagacgactgacgaatagcgcgcctcaggctgtcgctcaaaggcaactcgattacgcgctcggcaacaatccgatgaaggcagtctacgtcgttggccagtgcggcccttcttcttttgactcgacttgatgtccgctcgctgatggccgcgccgagcccccgtaggagctccaattcgccgcagaacccgcacagcgcgccggcctcgggcggcagcaatatctcggccatcgacactgacccactcgacacggcctacgtcctctatggcgcggtcgtcggtggacgtaagtctgggaggttggcaaggcgttgcaaggtgggcctacgactgatgtcatctacactgcccgccgccccagccggacaggacgagcgcttcttcgacatcagatccgactggccgcagaccgaggcgagtcctgctcactctttccaaccgctcttattttcaatgctgacgctgctcatcgcaggttgctctcgattacaactcaccgctcgtgacgctcgcagcctactcgatcctcaactcgccctcgaccgcgccagtctatgcgacgctttctccaggggcctactcggtccctccgggccggccctgtgacgccgtcttcccctgcggtggcaagaagcggctccggtccgcctacatcttcgcgatcgccttctcgctctttggactcgtctttggcgccgccctctttgcggcctggaagtggctcggctggttccgcagcaaggagtagactcgctttggaccttgtacagacatagactccccaccctcttgtatagcattcgacgacaacttggcctgcgaagcaagcaaagtgtcaccggccgtcgccgcgcgccgagcagaagcaagcccgagggaggccaagcgcctggctggctgcgctagcggtgtcgtcccctggaaagggcgttgcttgaacaacaggaggaccgcactatgtacttttgctcagcacgagcagtcaccctcgcttgctcggcgtccaccgaacgacccagcatggcgccagcaggagaatgatcgacgaagcgcagcgagcagcagcaccgccgccgccggccggcccgaccagtctcgtcgccgtcggagcctacctcttggcggcccaccgcctcgccgccttcgtgtgcgatgggctgagagctcaaaaggaccgacccgtcgacgctgcggcctcgctgacgacatccattaccccctctctcacattcgagccatgctgcccccttccttggccgttgcatctgcgctgctgctcgtcacctcgagcggcgccgccgccgcctctcttcctcctcgcacacgcgaagcaacggtcaagcaggcccggtcgcccgaacatcttgccagagtcgactggaaccggaggcaggccgagcggatcgaggctcgctacggtcggcagcgtgtcgtcaagcgcgatgcgaacgccaagtgaattccggcgcaacctgctcgagctgcttgagggggcagcctccctctctagcccagctcatctactgaccagcccctggtaatgatcctctcgcagcctcacctttgacttctttagctcgcccggctactcggtccgctgcaacgtcggcacgccgccccaggaactctatctccagctcgacaccggcagcgccgacacgtccgtactgctcctctggcccctgcttctgcccgtcagtgctgacttcttcgcttcactttggcgcagctgggtggccgcgaacgatcgagttagcatcgctctgaacgacttcaagcctggcggcatcaagttctacgacgcctcggccagcacctccttttccaagtgggttttgctctggatccgcctatcagacgcttcggctcataatactcttctctcgacaactcagcctcacccgcgatgttgacatcgactaccagcccaaccgctaccgcgaggacgccgagctcgacggctacctggcctccgactcgatcaccatcgcaggcgtccgcgccaactcgctctcgttcggtgtcatgaccgacgtcaaggaactgcagacactgccgacgaccaatgccggcgtcctcggcatgggcctcggcgtcggcgacgacacgggctcagtcgcttggtgggaagcggcacgcgccgactggtcgtctgcgacgtttggcgtccgtcttcagcaggttagcatcgccgatgaagcaacggtcggaagctggccgaggcaggccatccccggcggaggtcacttagacctgtaagccctgctcgcgacgcgttgcctgcccttgtgcgccccggctgacagcaacttcatttgtcgacttgcagcggcctgctcaacacgtcggcctacactggcgagatctcctacagcaacgtgacgagccaggagcgctggcagatccctgtcggcggactctccattaacggtcggcagatcacgatcgagtcgaacaaccggaaccccgccctccggacgccgcaggccgtcatcgacacgagctcgccgtacacctacgtccctcgccgcgtcgcccgcgcggtttacaacgccatccacaatgtccagggctccgacgaccagttcaccgtcgacaacggccgccctgccgaggttagtctgccttttcgagcgacaggacaaagtccacgacgtgaagctgacttctctcgtctgagcctcagctcgtcctcaccatcggcggcatcaactacaccatgtcgacgcgggagttctgcaccgagccgcggcctggggccaacagcctttgcttcggcgagattcagggcgctgacttggacggcgatgacgaagacgatgacgaggctccgatggtaactcggtcttcctgtgtgtctcctgccttcgctgaccgaagccttctccgtttctgctcactcgcgcacagtggatcctcggctacggcttcctctccaccgtctacactgtcttcacggtcgagccgaccatgaccggcggctcgctcgctccgcgagtcggattcgcgaccttggccgacaaccgcctggccgaggtcttcttcaacggctcgatcgccggtgtcggcggcggcgagactacgcaggcggctgctggcgccggcacgagtgctcagactggaagcagtggcaccgccgccgctggcagctcgacgcccggcagtgcggccgaagttaccatcggccggtcgctgggcgttgtcgtcggtgcgttcggtgcgctggccggagtcgcccttttatgaaaagaccggtccgctcgttctgcttctactcccgctatcttcccttcggtttcttgccccgctgtctctatagcttgcccatatttgtagcgacgatgcccctgctctcacaatgtctcgccgcgggaagcctgctttcgagagtcgaccaaaaaggaggcgtttcgggccgatcggcttcgcctgcgacgccattcgcctcctcccttcctcaaaggccatcgcctgactctccactccaagcactacatagacgttaccatctcatagagctgctggcgacgtagacgtccactcggccaatcgatccactagaaaatctcgcttcctgctcctgccagcccttgccgagcccgtcgcaccagctccattcaccgccgcccagcatgtccggcccggcttctccgtcggcctcgagccctcacagcagctctaccggatctagcgcacgcggccgctacctccggctgctgacgaacgcccagcttggctcgggcttggtcttctcatccttcctgctcgtccacctgatcccgcccgtcctgatcgccgttacgggtgaggagcgtgccgggagtgccttcatggtgcgtcgagcccctgcgtggccgtctcgcaccggctgccgactgacgtatccttgctctgcaacagttgctcggccgcgtctactaccagagcccgctcggcgagctcgtcgtcgtctatggctcgctcgccgtccacctcgtctcgtcgacggctaagcgtctcctctcgccgagctcgcttttggtcgtcgctcggtcgacccacgccctcgcaggctgggcgctggttcttcctttgacgtaccacgtcctcacgcaccgactcggtccggcctcgcccttgccgccgatcaacgccctcagcccggccgagctcgactacagcttcgtcgccggcgccgtcggcctctacccgatcggctcgaggatcgcgtacggcgcgctgggagcgctcgcgctctggcatgctgtcggtgggctagcaatcgtccgccggcgatgggcgcctgctggcaggaggttgctcaaccggctgctcggccggagtttcgcgtcaaccaaggccgcagtcacaccagcagcgggcaaggcatcgacatctgctccgtcggctagtcatttacggtcggtcacacgcttcctcactcctcggacgatcacgaccgtcgtcggcttggccatccttgcgctcgccctctaccaactcgagcacgatgctttcgttccggcccacctccgccgtcggatcgcggagagccatcggatctgccttccttggctgttcaagtgaagtgaggtgtcccgacgtggccggagcgacgggtcgacccgttttgaatcttcggtctcggcgcaccaaagacgtgcttggcgaccttgtcgccgctcaaggagtgcgactgcgataccgcgaggcaacccggatcgacgccctcctcccttgcccgccgacccgtacaagtcgcgcctcgcttaggccgagctcggccgatggtcggactgcgcgcggtcagacatacgacgcttatgagggcaaggccggcgctgaaagaaggggcaagggccagcggccaacagcagcaggcctcaagaggggccaaatggccttttgaccgtccgtctcccacttctccctagatgcgatgcatcctagccccgtctcccgccgagtcctgctaaaatggtcgggcgagggctttcgagcggacacgactcgagttggaaagcaagaaggcatgacagatggcaagagtgaaatgttgaaactgctcgacacccacttcctcacggcgtcaaccttccagcgacgcgcccgtggtcgacctcgtagagcgtctcgcacgggcccgcacgaacacgacgagcgtgtgccaggggtcgactgaggtaaagcgggctctagaacagaccagaaatgtccgtagacttggctcttcgctgaacctaatcgcccccttggcccgttgatgtgcgggcagggggcactgtctataaaaggttgcgttggggtgtgtcgaggggaagaggagaggaaggggaaaagggttctcggaggtgagcaggccgccaggcggctgggggtcagtactgatagaagagaagggggaatgcgagtcagtacgactagtcccagcagcgagagagcagataggagcccaagctgactgaaaacggaccttgcacagagcgagagggagggaggaggtcgtggccgttagcggttcagtggctgaaaacgcgccgggctcattttgagggccgatgcgcggggtagaggtctaacgacaggacgacaggttgcctctccgccgcgcctgctgttcccgagctcgcatgcctctcgaccgtcggcaccgtcactctccagctagctctcccgttcccttcacgagctctgatagaagacgatggcgcccgccaacctccgcgtggaccgtatcaaggtcaagagccgatcaggtccgtcattacttcccactgaatcagcagccgagctccaggagttcaacgttctcctcctcctgctccgctttcgccctcagccgactttgtgccgacgtgtgggcctcagttcgccagcatgctcgcctgctgggcgacatcgggcgacctccgtaacgccggagcatgtgttgaggctggcaagctgctgacgatgtgcctcaagagcccggtgcgtaaccgctggccctcttcggctcgtgccggtcggcctccattgcgggccatgctcattgagctaccaggcactgactctcgttgccacgaccgtgctctcccttggcgtccgcattatcgctcctccagcccgttaagatgaaggcgccccgatcgttcgtccttcctcagacgagctcgccgcaaccgcagcttcagatgctgatgctctgccccttccctacctgatcaccccttcacagcaacatcaatcagcacctgatccatctccagaagctcaaggagaagggtcgcaagcccatcatctagacggcgggcctggtccctttccattcgcactcgctcgcacgacgcggcccgctcgctcttcgagtctggactcgccgcgcacgcccactcttgcttcgcctctcatccatcttgctctctcgacgcttgctctcgcagcagggccgacgggggcgagatgacgcacgctcgctctggccggacagctccgactcagggacgacgacgttgttcaatcactcatgaccccctctccactctgatctctcaaagcgggcgcacgaccgaggccaggaggtcaacaagcagggtggcattgtcgagcggcgcgccctcagcgcaggccgaggctgacagcgacgccgaggtccgcaacgccctgcgctacgcgccgcacgacatcctcgagcagctttctgctagcccctccgcccgcagcgtccgcctcatcggcgagacgcgcccactcggctgaaagagcatcgcgttcgtctggccggttgcgggtgtgcgcgacgccggcggcgaggcggagggcgagcaggtgctgggctgagctagaggcgagggagccgtaatccgcgacggagcggccgaggtaagacgatgcgagcgccagggcgggttctgcccgaggccggcaaaaagggtcagtcgaggtgactcggggtggtttggaatttgtcaggccgccaaagacccaccgcggtcggcatcagcttcggacgccagcagcagcgcccgggccttggtcagactagcgaaagccaagagctcagcatcctctccgctgagaatctggcatggcgggagcgagtcgtcagagctgcggttcattagcgcaagagaacgccttcacgcacctgtgcaaagacctcgtcgatgagaccgctcgcgtagatgccctcgccgaggtcgatcatgacgtcggcgagcgcgactgtgcttgtccggtagaggccgaagagccctagctgctgggctgactcgactgcgccgaggatcagcggcaaggcgtaggacggcaagtgggatgactgcagcgtgcatcacaagttggaaggaagcgtcagtctggttgtgggaggctgaaggaccgactcgagcgctaatcgaccttgaacatttgcgccttctggagacgcctctcgatattggccctcgtccctcgtgagagtccaccctcgtcgtcctcgtcgtcgttgtcgacgtcgggctccttgtccggcgccgagccgcggaagacgctgatcatctcgcgcgcgccgacctcaccagacctggcggcccaggtgtcgagcacctgccaaacggtcaacgcccaggagcgatattgcgcaaatgacagctgaaggaggtcgagcgaaggaggcccgaataaactctccaaggctgggaggtaggcgccttggcgagccatctgtcgccgggcaagggaggtcagctcgggagcacgatcggctcggtcgaaatgagaagaggcgcacacgaagggatctcgactgcacggccgagaatcgcgcgcccaggcctgcggcgagcggaagcgcgtcgtcgtgctgctgcttcagcggcgacaagccaaggagcgagtcttccctcacacgtgctagacggtcctcgcctgttgggtgtcgccgggatcagtactgatgggcagcaaccgacagtgataggtagcgacgcacccatcgcatcccaaacgccgccgacgaggctttcccaggcgccaatctcgacgtcctgcttgactgcgatcggcgctttgtccttcttgtcgccagcagcattcgaagcgtcagccggcggttggccatgcgccgaggggggcgaggtctcgtccggcgggaactcttcgcggtcgagtgtgccgagcgtttggtagatgaggcgctggatctcggggaggggggtgccctgtgcaggaggaggggacgagatgatcatcaagtttgaggcggcttctcactcgaagcgcggcgagacgcacgcgtgagaaacgatgcgagatctcaaagagctggtcggaagcgcacagctgttcgaacgactccgccttgacgccagcaatcgcgccggaaagtacgtccgctgagccagagggtaaagaggcggtggccgcgtcgagtcgtcttgagagcgagagacacttctcgagcgcggctcgatcagacgcggcccgggagaggcggagcgcttcggcgagcatctgacgcagaggcaagcgcatcagcccacgcgatgacgagcgagcgcctttggactcggtctgctgcaacgtactagtttagcggccttccattcctcgtggccgaagtggaaagaggcgaggttgagaaccgcgtggtgatgcatgccctcgacccggccctccttgcctgcctcgcgctcctcggtcgtgctgccgcctcctggccgcgggagcgggtagtcgaagaagcgttgaaggttggcaagcgcttcggagtagttgccacggtgcagggcagtagtgtaggacgagaaggatgccagccgaggatcagggcctggctctatccaagagggaacgtcaagcaagggttagccgagggggtcggcacatcgacatgatgaagcgaagaagagcgcacgcttgccagccacaccgggtcccgactctttgccgtcgacccatcggccaagcgcctcgagggcgctcaggacgcgagggaagtcgagcccgttcgcgtgtatgacaaagcggcggacggcaaggccgagcggtgacttccggtcctggtgggcaaaaggggtgtagcggccatcagcaacgagcgtctgagtcagcagggaactcgcagaccagacgacgtaccaagggaggagcagatggtccgacgacctgtggtcggtcgagcaggagtcggtgtcagcctcgagcgcagcaggaggtcggcgttccggaaacagaggactgacgtcctcgtcgcgctcgttgaccgtgcctcggagcaggcgcacaaagtcaaagaagcccgtcacgtctgcgaggcgtttcagctggccgtcgtggagcgattcatcgtcagctgggtgctacgatgcgagggggacgcagggagggaccgacctggaacgtgagcagccggagcagcctcggtccttcgcttcgtgcgtctccaggcggaagaagaacctccttggatagcgcaaggatctcgtattggagatgagcgaatgacatgccgtcatcctcgggtgcgagcagctcgcgcaggaggagggagaagagcgacgacgcgaaggccgggctgagccgggcggcgccacgaccgtcgtcgtcgttggagcggagaacggatggcgacgatggtggcagtggcaggtcgtctggggcgaggacgagcaagaggaggacatgcagggccagctgggccggtaagaggacgctcggcatcctgactttgacctggggaccgggagagagctgtcgacgagatcgttgtccagggcgagcaggcaggtcgacctcgttcgacgcgtccgagctctctcgtctccgactccatccccactcgtcccgtcgccattccctcctcagctcgacttgatacgccgtgactgctcaaagtctccagcagacatctcctcgacccagttcgaatggccacctcgccgactttctcgaccgactcgaacgcggccgtgtcgctccggccgtgccggacccaggtcgacgcgctcgtcctccacgctgactcggccgtcgaccaggcgctgacggcgccgttccaccccaaattcacctatccggtctttggcgacgaccagaagatctggggctacaagggactcaaggtcgaggtgcgtccggatgagctgagagggtcgcctgtactcgaccgctgacttcgaccgggctcctccgcctctcgccgggcgacgacacagatcaaccttgcctcgagctcgctccaccagcacctggccatctcgtacgcgtccaagacgggatccaagacgtcgccgccagacgatatcgaggccaagttgaagccgtacctcgcgcctggtgagccctgcttgctacctgtcgtcctcgccggagccgagagctcgtcccgacccaacgctgactgacatatggactgtttgtcactgcccgctcggacagactacacgacagaccgtgccagcttcgaggctcagctcgaggcctcatcgtcgtcctttcggccattcggcacgcttctctcgagctacgagcgcaagtctgagacgcaggccaagcgcgagaggctccggaagcgcaagtaccgcgatccagacgaggacgaggaggagagcgtcggcgagaagggaaaggtcgagggcgacgagagcgtgacgtttgaggtgtggaaggtgagtgcgactcaggcttcgcgctgaaggagttgagagttgccgctgacccggcgtcgcctgcctctccgcagacgagttggaaggacgccggtttccgcgagttccaccggcggatgcgcttcttcatcatcctgttcatcgaaggcggccagttcatcaacgaagacgaggacctgtgggattttgccgtgctgtgcgtcccctggtcagatcacgccccccgcgaaaactgctcgaagttgctgaccgactataccgctcgcaggtacgaaaagcgggtccgaccacaggcgccggacgctccgccaaatgcgctgcgagcgtacgcgtaccacttcgtcggctacacctcgctctacccgttcttctactacccggaccggatccggctccggctctcacagttctttatcatgcccgggtaccagaatcagtccgtcttgcgtcgagcgctcaagctgcaggttcacgacgggcttggctgacacccgccctgtcttgcttcgcctcaggggccacggccaagcgctgtaccgggccgtctacgccttggtcaccagccggcccgacgtcgccgagctgacaatagaggacccgtccgaggccttcgaggagctccgcgacatctgcgacctccggctgctcgttgcgggcattaagcggggcgagtgggagggcaagctggcgatccagccgggggcggatggggcacccgtagtggacaaggcgtggctcgaggccaaacggcgagagctcaagatcgcgccggtgcgtggcgtccctccagtcctcaaacgatccacggctaggctgacgctccttcaatcctcgcacctgccccactttagcggcaattctcccggctgtacgaaatgctcctcctccactacctcgagaacgtggagaggccagacgggtcgacaccgaccgaggccgagggtcgggcgttccgactcttcgtcaaggagcggctctaccgcttcaactacgtttgtatctctatccgtcgcacaacgcttccaggtgccttcgctgatgccagcctccttccaacgcctcgcctacatccaggagcagatccagcaggtggaccccgaggaacggatcgaaaagcttgcggagacgtttgacaacctgatggagagctaccgcgacctgctcgagcgcgcgcggatcggcgagtgaggggacttcgcgagtgtacctccgccgacgctcggtcgacggagggtggactcggcatagcatgctcgttcttgcgactcatgccactgggctcgcagaccttgttttagcttgtcgtttggctgatttaaaaatggacatcctcaaagcgctgcgttccactgggtgacgcgctcgaccacccccgccaggtccggcaccgtctcgacttcgtgcctgccgccctgcttatcgtcgaccgtcaggatctcgttcgacgagcggtctgccccgtccgagggcgtctggtcgggtcgtcggaggaggagcgcatgaaggccggctgcgcgggagccgtggtagtctctggcagagcgatggtagacaagacgatcagcaaagacgtttggcatctgcggagtatcgcgtctacgtgtggtcaagggacgcacgcctcgagctcatcgccgaccatgagcgcctcgtccacctcgacgccagctcgcgcacaggcacgctcaaagatcaggcggtcgggcttggcaatgttctcgaggtgggacagagtgggcgggctggaaaggagcgcggtaaggtcgagcgagtcgagcacgcgaactgacgagcgacaggcgcaaagaggccatagggtgagtcaattccttaagaactgcacccagacgaaatcgacgcacggattcggtcgtctgcattcgacaggaccgccgtcttgacgcccatttcggcgagccgttcgagcactccgtgggtgtcagggaaggccgcgtagccctctctgctggcgaagcgggtcagaagccgaggtgcaagtgttgggagcacgcgagctagggctagtcgtgcgtcgcatggcaaaggatatcagcaatcaagagttgggatgtaagagacagagccgacccggcggggaggggggacggaccagcctcatcggcgccagcggcgagcatggtctgctcaatcagcagcgtccaccatcggtcggctgtcaacaacggagttgcccgggcgccataaaggggatactgggctgtcagcgcggggaaggctggagaggcggcaaagcaagcagaggggcgcgttggtcgagatggcggagcagagacgaaaagagacggccagcgagggtcagcgatagtctagcggacttgatgagcaggtcaggacagggggcgagagatacgtacacgtcttgaatcctcgccggacgtcggtcgccgtaaggccgaggaggcccgcccgctgcgcctcgtcggcatactggacgtgaatcggctgacgaggggtgatctgatcgccaggttcgaaagcgaccgggtcagcgcattctgcactcagatcgagcaccggcgacgtgtcaggcaatctcgagggaacgtacgagggtgtcgaaggcgtcgagcaggacgaggcggatccgtcgcctgccgcaggcgggtcccaagggagtcgagatcagctctcgcctggaggacctggctgccagcgccgggaagaccaacctaggagccgtcatcctctgtcagtactcggtcagtgctccctgtgttaggcgtcgaaggcggtcgttgcttggagatctcgtcgttgtcggctcgtcgtcgtcgtcggccctccgagccgggcaacaaaagctagggttaccaacgccctgaggagggatcagaagctcgcgcgccgcctgctcgaccccgcctgcttcgaccgccgactctttccgtcaccctccagatcctccaccatgtcgttcctgccctcggtcgcctcgacctcgtcccggtcagcagcggcctcgagcccgcttgcctttgttcggctctaccactcgcacctcggcccggtcgacctcgccatccacaagaaaccgccggcacccgtctacaatccggcgaaggacgtcctcgatctgtccccggccgagcggccgaaatggaacgccatgagccagcggagcgggacgctcatgaccaaaatcggcatgaccgcggtctgggatacgaacggcgtccgtgtgccgtgcaccgtccttcaggtgcgtcgtctgaatcgagctgcctgccggctgcagcccgcccgagcagccgagcgaggtgctctctctgagtggccactcctctggctcgccctggacagcggcgacggagcatacaagggcgacgagggatgctcagagagctcaggctgacactttcgaccgtcctccctctgcgttctgactgccgcttcgcggctcgcccctcgcacgacgacctgccaccgccctccagctcgagaactgccaggtgacgcaggtcatcccgccgcggcaggccaagcttggccgccccgacttcatgactctccaggtcggcgcctacaacctgcgcgagtttgtgattgacccggttgagcgtcaggcgcgcggcctcgcgccgacgcgcaagacgaaccccttcaacaagccggcaaactatgtcggccactttctgaagcacgaggtcgcgccaaagaaggtcgtccaggagttccgcgtctcagatgacgccgttttgccggtcggggctacgttcagtgtcgcgcactacgtccccggccagcacgtcgacgtccagtcgaccagcattggaaagggaacggccggtgtcatgaagcgctggggatttggaggaggaaacgcctcgcacggagcttccaaggaccaccgtgcggctggttcgaccggtcagaaccaggtgcgtcttgctcactcgcgcgccgcctgcgctccgtcgcgctcgcgggctggcagatgcaatcagaggcgaccagtgtgagagctgacgcagactttctccgccgctcaaaggaccccggccgtggtttccccggcaagaagaaggcgggccacctcggtgcccggtcggcgacacagcacaacctcctcgtccagcggatcgacctctcgctctcgctcgtctttgtcaagggctgcgtgcccggcccgcccggtgccatcgtccgcgtgaccgacgctcttgccggcgtccttggcgccggccggaaagcgctccgggccggcaagggcgagggcgagctgctcaaggacattgtgacgctaccgttcccgatgggcgacaacgttttggccgagagcctgccgatggtcgtcgacgccgcaccgaggccgctgccgccgggccagggctcgctctactaagggagggcataatgtatgggcttgacccctcgtccgcgctgggcgaggttccgcgccgtcgcgcgctttgcgcttgaccgagccggctgcaggagcggcagcttcggatcatgtttgggttccaccgccgcaagcatgcgcatgagctcacccgtacgtgcgcaggagctcacccgtatggcatgccagcgcgctcaagctctgaaagactgcgggagacagtggatgcgcgcgcacgtacaggccgccggctgcccgcgcagtcgcaacgcgttgaacagggggccgggcgacccttcggccgctcactcccaaccgccatctcgttttcagcagaccatcgccttcgcaagtctccatcaccgatccatgtcggtgcgtcttcttccagccatgttgccgtccttgagctcgctcgacaaaccgtctgactcgagctctttctccgcctgcctcctgcccttgccccctgatcgccttcacagagcggcccgacctacccttccagtccagcagccacctggacccctggagcgagtgcagcagagagccctctgcctcttccgcctcctccatcgtcccgtcgtacgtccaaaccggcatgcagtcggcgactggcggcggcagctcgctggagtccctttcatacccggtcgcctcgttctggccgacgccctatccgcccatcgactcgagtcagctcgctcctatgcaggcgtatccagccctgtcattgccctcgacgtcgggccaccggctttcggtacccaaccaggcctcggcccttgccagcagctccaaccttggccggcatccggagacgccgccgacctccgccgcctcgtcgacgaccaaatcggccgaattcccattcgcctgcacctcgtgcacacccaaggagcccttttttgcgacaggaagtgcacgcaagatcgagtactcatcgacaggtctgccttgtccgtctgtcgtcagacaaggctacgtgcttctcctcgctctcgtctccgatgctgggcctcctgtcgtcgcaaggacagtaccactcatgcctcgtctctcgaaacatggtacgatgtcacccgcgaaaacggcgtcttcacgtgccctctctgcgagcggaccaacgtctcttccgactacctccggaagcacatcaagggggcgagcagcacagcgccgagcagcttgcggccttgccctcactaccggctaactggacggtcacaatcaagatgccgccggcggtcactccgctcaagcgcaagctctcggctccgtccgtctcgaccccggggcgccggtcaagcgcatcgttccaggcgctgcgcgcgccggattcgcgccacgcgtcgccagacgtcgtcaaggtcatgcctttcgacgatggccgccagccagcaccagcgcactcgccgctgccgcacgtgcttaacctgacgcggtggtcgtcctgcccgtctctcacggcctgtcatcggccgacgcactcgtagcgcagagctgcctcgactcgctcaaccggctcctgaccaacgcacggccggccgtaccgtcaaacttcggaccaaagaacacgggctcggctgattctccgccagcctcgcttgctgcttcaagctcgacgcccggcgacataaaggcggaggcgctgctcgagcgccttgataaggacgcgccaggcgcagcggttgacgagcgtgccgtcggctctggtgcaagctggggtcgctggctcctgccgagcacctggttctgacgagcggccgttggcacaggatgcatatgtgtctggtctttcctcttgatgaatctcctccttttgtttactgcttcgtgagaggaggcgactggcaaaggctgtcgttgatgcgcgcaggattttcgatcgtcggcgcaacaagccaatctcgccgagtgcgcatggcgttcaggcttctgcggccatcgaagatgaaagcggcagcgccctctatcgtggacacggtcgagaagcgggatgacgttcccagcgtcttctatcgcgtgcagggcaaacgaccctcggcctcagatggaggctgccggtcatcaacaaaggcaaagcgcagagcaccgcgccgcggcgccggttccgccagtgacggtctattggttgcctgaccgcgacggcgggcggcctggtgaagagccggctctgggcctaccgcgccgctggtcaccgattatcttttatgagcggtctgccgagcgcaaaggcggaaggtaagccgacggctaccagccgagctggaagcggccaaaagcaaggggcgccgcggcaacccctgttcggttcgtccgactgtgactggccgaggagggccgagatggcaaaagagtcggggctcatctagggtccgacgctggccggcttgcccgcagccgacggtagtgggggaggcaacctccgagcagcgctggcgccgccgcatccgtcgccgacgtcgacgaggacggccgcaaagtcgtcccctgtcggcgcggctggcctcgtccagcctgtccggccaccgagaccgccgccggtcccagcagaagagcgaggtttgcttggcgggggagcgactctcggcggtgccggtcttcgccagccggtcgagggggacgaagcggatgccggcgacgatagcgacgcggtcgggcttggaatccggcctccacttgcgctcgtcaaggtgggcgcaaggggcgagaggacccgccgaggaggaggcgggaggggcgctgatctgctggccaagctgccggcgccgagggcgggagccagtgaccggggtgacggccctgacgcagaggaagacaaagtaggctgccctcggctctgcgtcgccgctccggtagcaggcggcgtcaaagagagaccggcgaatgtatgctggccaaggagctcaggggccgccattgtcgtcggtctcggtgcgagcaacctcggcggccctcgtacgacagcaggcgcagatgccgccgaagccggaacgggcaatgccgcagccggcgctgaggaaaccaagggcggatcggatgaaagcggcgagcgcgaggaggcggtcgtcatcgagggcttggacgacttgggcgggacgggcggcgggggtgtcatttcgctcacgactgccgtcgccgtcgtctgcgccaatggcgaccgcgagcgatgagaaaagcccgtcgccatcgggtacaatggcggcgccgagacctcgagctgctcctgttcgatctggctcccactggggcttgtcgacccgctgccgccgttcgcgtacgactttccagcctcctttttggcttgcctcttgatgaacgacttgcctgcacctttaacgagcgcccggcggcctacgcccctgtgtgacgagggcagaagagagggccgtaagcatcgcagtagagggggccgacgagacgaaatgccaagcaacgcacctcgcatcgacaaacgcgacgccgacgttcctgacgctcccgcccgccaagccagccgcctcgcccgcctcctgcccatacttgtgagcgatgctctttgttgcgctcgtcgtgctcgccccgagcacctgacccgtgctcgcctcgacgctcgtcaggaggatgtcgcccgccagcagcaggcgcgagacgagcggccgattgccgtctcccggctgagaagggagtggctggccgtcggggccgagcggaggcggcgtatttttccggacggccgtctggcccttgtcgaacgtgtattcggtcgcgcgcaggatcttgccgttgatgaagcccgtcacgcgcttgacgccgtccttgccggtcgtcgtcgcgccgctgaagagcagagggaaaccccaagggtcagacattgtagcgcggagcctggcgagcgcgccaaagcaacacgtacttcatccgctcgagcgtcgcccgcgttccctgcgagacctggacgggctgggcccgcgggacggccttggcgacgtaagcgtcgctcgcgcgctcgagccggttcgagacccagccagcgccggtcagcatgttctttctactcgcagcacgaacgtcggataaaattggtggcagcgagggtcagcactgatggcatgccgttgatcgacccgctcgaccaggcggcgacttgtcgatggtagaagaaccgagcagggacacgtacgagacgacggcagcgcccttgagaagccagtcgtcacgctcgtcctcgggaatggccgtgacggcgaccccgccgacgaacgtcttgcgcgggccggccaagtccccgtcgttcaagtcgacgacgacgggccctgctgcggccgcctttccatcgccaccagtcgcaccaacgacacccgcgccttcgagctggctcggatcgagctcgccgaggacctcgcccgtgtcctcatcgacggccagccaacgcccttcgagcgcttcgtccttgccgctctcgcgctcgacctggacgacatctgccaggagctcgacgaacgccgcctggtcgaccgcttcggcgtcggatgctgggaagggtaggtggagggtgagagggggcgtcgaaggatggagaggtgggaggaggagcgtgttgagcgcgagcgagtggaggagcgtcgaggaagggaggaggcggtagcgctacgggcgggagcgagagcacgcgggcgggtcagctcgcgtgagctggctcgatcaacgctggcgaggtccttcttggagctcagaaagcaagacgtacaaagctctcgccgaccaggaggacgagccgcggctcggtgcccgtgccgggcagggcgctcagcctgtcgacggttcagaagccctcagccccactcgcgaccctctcccagccggcaagccccctctctcccctcggtacccggtcgcctcaccccgcggtcgtctcgagtgcccggcttccttgtctctctcgcaactcctctcctaggaccttcctctcgcttcgcggagggaaatcctagtcccggagtcggccaacccctcgccgcatgtcacacccgtcaccagtgccgatcctggcgtcgaccaccaatggccggacccagctcaactcgccgccgatcccgtcgttcccgcgccagcagtcgtgggccagcaaggagtttggcggctcgtcctcagccggctgggcggccggcggcatgagcatgagcccgccgggcggcagcggcctcgaccgaaacggcacgtcggccgctagcgccgcgagtgtctgggcgccgagcggcagctggcgaggagagggctggcaagggtgagtcctcctgcgctctcagaagggtagcgaggcggtttagcatgcgcgaccggacgacggtcgtgctgtcgtcgctggcgtaggcgggccggtctcatccggaccgtcattcctggcgccttgtcctcaaccgccttccagtctctgacacgccctggacctctgctcaggatgactctcccgccggcgtcgccctcggccatgtcgagccagctcccgctcgccatgtcgtaccactcggcctcgtcgccgttccgacaatcgtccttcctgccggcctcgccggcgctgtccagccaagagctcgagctctcaatgtcggtcgactcgatgccgtcgtcgctccctcaccgatcacagtcggagctcggctcgctcatctcgcagcacaacgcctttgccgtcgcccgcgagggctcgtttggcagcggcggcttcacgggcccggccagcgtcgaacggctgagcaagctcgagcagaacttcacgagcaacttcacttgctgcggcatcaagctcaagggcttgcacgacctgctcgaacagtacgtcgcgctcgctggcgtgcgctgtcacggggccaagtcgccggactgacagatccgtcatcctatgcgcgcgtagctacgaggagtcgcacgtcctcgtcggcggcggtggcggcggccagtcggtcccgaacggaccgtcgttccagaagcagcccgtcatgccgcgctcgtcgtccgtctctggcatcacgcctgcaatcgcgacgtcgcactttgcgacctcaacgccaccgcacctgcacccgcaaccgaacgcggcccatccggctgtctccgcgacaccgtcaccgaccaccgactcggacgcgccacacacgccgggcatgatggatatcgagatggacgacgccgtcctgccgagcccgttcccgcatccggcccggagcacctcgctctcgagcggaccctcgccctggagctcggcttcggctctttcccagaccgacacggcgatcccgcaatgtgtgccgccgtcgctactcacctactctctgccctcgcgagcgacgtcgacaccggcggcggcagcggcgagcggtggcctgctcgtcggagccggcacaccgacggcgccgacgacgacggcggctcccaaaaaaaagtcggcgcttaaaaaggatgtccccgtcgaggagtttgccgagggcacggtcgagatcaacgtctcgtccggcggcggcggcgagaagcgttttcgatgcccggtcgagggctgcggcaaggtctacaagcagcagaatggtcttaagtgtgcgtccaaccctcgaggctgctggttgcccttttttgcccaccgctcgcttctgacgactccctctgcgccgttgccccttctcccgcagaccacctgcaacggtcgatcaactcggctcacggccgcgtcaacgggaccatcacgccctcgggcactgtcgtcctcaccccagcctcggtcaacgcaacgcctctggcttcggcggccggctcaccagcgtccgacgccggtaccgcctggtccggcaaaaacagcgtgtcagcagcctgatgcactcgttctttcaacccttcctcttcctttctggactgctcctttcctggttagtcgcgcttgccgtcgcgtgctttcgtctcggctccccccatttctctccaccgcagaactagccctgttcgtcctctcgcgcgcacgtcttgcccgttcgtctcccttctctcccgaggcggacggcaaggccatcttccgacaccctcatctacccctctctcccgcctttcttcaaactcgctctctccctgttgacaacagtagtcgcatagttttctcggtgttccgggggcttagagtcgctgggccgccccgctctcagccaccccttcgcagggttctgagcaggtcgcacccccccccccgttctcaggcctcctcttatagatttcgcaacgagctcaacgcgcgcgccccgactcgcaagcgaagaggtcgagtcctgtcagggctcatgcagaggatcgacactttgccctggcggccgcttcaccggtcgggctgcgtccgcgagcgcttgctgcttgacggcacggcggcctcctcggcctcggcgggagcggcgacgtcctcatcgcccatcgcgcggccagcctccatcgcgccaaagagcgcgctctggacgactgatgtcaggcagcagaacatcagcaggtcggacgagcgctacaggttccggagaaagaaggacgcacgctcggccagctcggcatcccggttgacgccgtcctcttcgcactgcttcataatctcctcaaacttgcccatgagcgtcgttgtctgctcctcggtcagccgctcagccatgagcgacgacaggtgctcgttcgtcagcagcgagccgacgtcggcgtcgtcctccatgccagagtcgtcgtcgtcattgtcgtcgtcggcgccggcgccgccgccgccggctactggcaggagtgaggccgggagcaatgtccgcaggtaggcggcgacttctggcgagtcctcctccaagaaatcggcggcctagcagaagggcgtcagcaaccggccggccgcagcgcatgtggcaaaggggaacgtaccgtctgaccctcaaggttctgaacctttgggtcagcgccgtgttcgatgagccaccgcgccgttgcgacgctctcgaccgtgaagagcggcgtctcgccctcgttgtcggtgacgttgatgttgccgcctttggcgagcaagtacgtcaggacctcgagctgggcgtacgaggcggcagcgtgcagcggcgtgtaggtgttagagtcgggcgactcgggcgtcaggcctgtgcgttgggcaagacggtcaatcagtatcgatttctgcttgcatctctcgttagcagcggacaaaccgtggttctcaatcaggtcctgcgaggggaagcaggagcaacgtcgttcagcgccgggagccgggtgagcagcacgcgcgcgcgcgacaccctcctcgacgcaccttgacccgctcgaggtcgccgtcgccggcggcgatccaaacgtttttgacttctgatgcgcgtgtggtcatgtttgtcctctgggaatgtgtgctggtgggtgtgcgagagcgagagtcgcgtcggagggagcaaggtcgactcgaccttccgccacgcagcgccaggctcgacgtctacgcgggcctggcgacggaaagaggagagacggcctcgagccagctgagctcccgaccacatatcccgtactcttgtactttctctctctcgtcgcatcgcactctactacaggcacctcgcgctcctctcctctcgctcgctccttccgatttgatcgctcgggcgcttcaacagtctcgtcctcggccacccaacctctccgcctcctgctttcccgacccctctcgccaccatgggtccgtgcactgtgctctcctcagcactgggcgaacctctcgggctgaccgctctcttgctctgccatctccaggtatccccaaggtgcgatcggtccagcctcgtgcctgaggctgagccagcagcatctccttgtgctcgcgggctgacaccttgacgtcctctccgctctcgatcggcgtgcctgtggtggcgacaaccaactcctccctcagttcttccgctacatctcgtccgtcctgattctcaaccatacctgcggatgtctcgacaccgtcaagctgacgccctcccaactgtcctgcgccttggcagggagcggtatccgttgacctcggagctcatcacgccccagtcgataccgatcttcgacaacctatagtgcgtgggccagcacctctctctcgcgtggttggcctctctgacttctgctccccctctcacatcagcctcgacatgaacggcatcatccacaactgcacgcacccgccgtcgtccgagggcaacgcatcgttccgactgacggagcagcagatgatcctcgccatctttgcctacattgaccatctcttttccaagatcaagccgcgcaaggtcttcttcatggcggtcgacggcgtcgcgccgcgggcgaagatgaaccagcagcggagtcggcgcttccggaccgcccaggaggccaaggagctcgaggagaaggcccggcgcaagggcgaggagctgccgaaggaagccgcgttcgacagtaattgtatcactccaggtgcggcttgcctgcgacgatcaaggccggctcgaggagtctgctgactttgcaccctcgcttcatcgacaggcacgcccttcatggcccgcctttcgcagcacctgcagtacttcgtcaataagaagatatcggaggacgccgagtggcggggcgtcgagatcattctcagcggccacgatgtgcgtgcgccatctgtccgaaggcttggggcttcacggcctgacgctgatgcgcgccctcgtttgaccaggtgcctggagagggtgagcataagattcaggagtacatccggctcagcaaggcccagaccgactagtgcgtcttgccagcttttttacggccagcaatcgacgagctctgacgcgctgcgttgtctctcgaacgctgcagcaaccccaacacccgtcactgcctctacggcctcgacgccgacctcatcatgctgggtctccttagccacgacccacacttctgcctccttcgcgaggaggtgacctttggccgcaagcagaaaaagactgggtgcgtccaggcctcgcgcaagaggtcgcaccggcttgactgaccccctcttctctgccgtggtccgtcaggcttgacaaccagaacttctacctgctgcatctgtcgctcctgcgcgagtacctcgacctggagttcgaatctctccaggagacgattccgtttgactactcgctcgaaaagatcatcgacgacttcatcctcatctcggtctttgtcggcaacgacttcctgccgcatctgcccgacatccacatcaacgagggagcgatggagctgatctggggcatctacaaacgcgtcctcccgcgggctggtgcgttgccaacacccgtcattggcgtcttctcgtcctgacgctcgtcgtctcctcccttacctcaggcggctacctcaacgagtcgggtaaaatcaacgtccagcgcctgcagctcgttctcaacgagctcgccctgtttgagcgcgagacgttcgaaagccactacgcagagccgaccggtcacagccgcaagagccacaaagccatcggcaacggcaagtcgcgccacggcagcgacaagaacaagacgagttcgttccgccttgagtcgcctcctgacactctgcagtcgactgacatgagccttcgttcgcagctttgacgaagctgcagaaaggcctctttgacgagctcaaggcgttcgtccgggctcacccgaggccgagtgccgaagacaagctcgtcctcacccggccggcgttcccgccgcgcgaccgcaaggccctacaggatatcgccgacgacctgcagctcgacctcgtttgggacgaggaggccgtggccgaccagccgattgtcattgctcgctttggcgcgctgacgctcgccggcgtcagcgacgacgaagaggatggcgaggacgagatcctcaaggagcgcatggccgcgcttggagtcaccgacgcgaccgacgccggtgcgccgcaaccaaagacgcgcgagggtgacgaggctttggagcgcgtcatcaataagtgggagaaggcaaaggtcgtccacgaagaggacgacgaggcggccgacctgcacgaccgcaaggtgactgagcagctcgaagactggaagctgagctactacaaggtgcgtctgggccctgcgcgagtcggcggggtcgcccgactgaccatcctttccgtcctcgaccggccctctaggagaagctcgagttctcgctcaaggacgccgaccaccaggagatcaaggacctcgcctacaactacattgagggcctccagtgggtgatgtactactactacgccggagtcgccagctggggctggttctaccactatcactactcgccgcgaatctctggtgcgtccatgggtcgcgcatcaagagtcgcttcaactcgatgctgaccgcgctcgctcgaccgctaccagacctccgcgacgtcgacaagatgacgtttgactttgacctcggcaagccgttccacccgttcgagcagctcatgggtgtcctgcccgccgcgagccagtcgcacatccccgaggccttcagggtgcgtcgcgccgcttcctggcagccaggtggcactcggcttacctctcttgttggcccctttggcaggagctcatgacggagccgagctcgtcgatcctcgacttctaccccgaggagtttgaggctgacatgaacggcaagaagcaggagtgggaggccgttgtcaagattccgttcatcgacgagaagcggctgttgcaggcgatgaagggtgcggcccgggtcatttcgcgtgctcttccggttgcattcactgaccggcgcgaccgtccactttgccagcccgcgagcaccgtctcagcccggacgagcgctcgcgcaatgcgcacggcgagccgatccggttcatgtacgacgaagagaccgagaacttctttgcgtcgacgatcccgggcttcttccccgacatcacgcacggccactgcgcccaagacgtctatgcgctcccgtcgctcaacggcctgacgttcatcgaaggccttctgccaggcgtccagctcggctcttcggcccttgccggcttcccgtcgatgcagacgctgccgcacgcggcccagcttgcctaccacggcgtcaacgtccacaacagcgacagcaagaacccttcgatggtcatcacgatcgagaactcgtgggagggcaagaagacggaggaggcggccgaggtgatgctcggcaagaaggtcttctccggctggcccttcctccgcgagggcctcgtcgtcggcatctcggactcgcacttccgttacgagcgcaccaagatgggcggccagggcaagttcatctcgaccccacactcggtcggcgacctcggccagttcaagcgcaaggccgagcggatcgagcacttttactcgaaacgcttcggcatcatcacgggcgaggtcggcgtcctcctgcacgtgctgccgctcaagggttcgtgtcttcctctggcgttcacaaagtctctgcgtcgctccgctcacaccctcctcatccaccgcaaacagacctcaagcggctggataccggtgcctttgtcaaggactacgagaagccgggcaacgagatggatctcgcgctccagctcgccgtctcagaggtcgagtttgaggacgagcgcttcctcgtgcgtggccctcgctcgatcatgctcggcagacgaagctgacccctctcatcttctgcccgtcttgcaggagcgcgttgcacccaagctctcggacgagttccctgtcggcgagcgggtcttcttcctcggcgacgtcctttacggctccgctgcccaggtcaagggcacgagcgagtcgaacgtctcggtcggccttgcggtgcgtcatctccacgacctctcgcccttgcgtgcggttgatgctgaggacgctacttctgctccgcctgcagttcttccacaacgaccagaaggagctcggcctctaccggcgcgtcgccgagtcgcgctcggccggcaactacctcgcctcgtacgaggcggcccggcggctcggtgtctctggcctcggcctctcgcgtctgacctcgagcctgctcgtacagacatcggacggtcacaagaccaacattggcctgagcctcaagtttgagagtaaggggctcaaggtcctcggctactcgcgcaagctcagccgaggctgggagtttaccgacacggctgttaagctcatgcaggagtacaaggtgcgttctcggtccgggtgggtgcctctctcaacagccagctcactgccctttttctcgtgcactaggccgccttccccgagatcttccggagcctcgacatgcaggacagcggcatcctcaaggccagccgcttcttcccgtcggccgacaacgccgatcagacggtccgcgagatcaagaagtggctcgagcagaagggcgtcaacaactttgacccggtcgccctctttgccgagcagctcgacaaggtgcgtctgctggcccccgttccgaggcgctctcgctggaggctgactgcgacccgacgatctacaggacactgtgagcgagctcgagcagctcgccgaccggctccagcagcagcgtatgtcggcccagatcaagacggcgacgatcaagggcgcgcctcggcaggctatcctcaagccagttcatgcccagtaccgcctgcccggccagacgtttgcgctcggcgaccgcgtcattatggttcaggaggcgggcaccaacggcgtgccgttcagcatgaagggagtcgtcatcggcgtcaacacgacgaccgtcgacgtcgtttgggacacgccgttcctcggcggcaacaacatgggcggccggtgagtcatgagggcccgcaagcagcacgaagaaggctcccctgacgactcttgtgctgcgctcttttcttcgcttagctgctccgagtaccgcggctcgtcctgctccttctcggcctgcctcaaccttacgacgccgcagttcagcgtggccgacaagcacaagccgccgccgagcgtgcctgcttcggcccgccccgcgcccggcttccctggccagcagcagcaggctcggccgaacggcaactacttcaagccggcgcccgttcggcccaacccgcaggcgggctttgcgattgcgaccaacccaaaccgggcgcagcagtcggctgtcaacggcgccgcgttcaacagcgtcgtccagggcatccgaccagcgcaggtgccggcggccgtcgcccaccgcaacaacctccagaacacgcttcgcggaggtggaagcgccactcgcccgccgcagcccttccgcccgccgccggccattgcttctcgcccaacaccgacgggtccgcaaggtgtggctcccgccgccagccgtggtggtggtctcgctcagacccgaggaccggccgctcattcccagcaggtgccggcgccgcaggctgcctcgtcggggcgtcccccacgtggcccacgcggcggccgaggcaagggtaaggccaccgcctccgcctccgcccccgccacatagccgcctgtcgtctggatcacgatgagccgctctcttgtacatgttttttgcgggtcgttcgtgttgagccaactcgaggagagaacatgtcgctgcgcgtcgccggagcgtcggaccacgccgcgagaaagtcagccccgcggtcctcttgacgtcgacgctccttcgtaccagtttccctcttcaccagtccacagcacctgttctgctcagatgccgccgcgcaagaagggcaagggcatcgtgtcgtcgggcgccatgagctcaaaggcgtcgcccctcccgcccaaggcgacggagccgctcgtgcccctgacgccggacgaacttatccagcaggagctcaagcggccgggctacaaggtaagcttggcctagggtccgctcccttcgactgatatctgctgaccctgctgaggactgtcctgcttaatcactccctgcagacgcccttgacgatccttgtgagtcgagctcctggctcctccctctcggaaggtctgagagctcgccggcgctgatgcctgctgccctgcggccccgtcccttccagaatgagcgctgccagaagctcggctgggagcggtccatcgttaatgtccgccagacggggcccttcttctcgccgacggtcgtcctccggcgccacaccaagaagagcaagaacagcccgatcgaagagtgctcgctcgcgccgcacccggcgctgcgctgcgcgaccgccatcgaagcgaggcatatgggcgccgtctactcgctcttccgcttctgcagcggccagccgctggcgatgacgttcccgccctactttcggccgtactggaccgagctcacgaaggagaaggctgcggccgaggagcatcgcgcgtgggagtgggcggacgaccccttcaacgcccgcaaggccgtctcggagcgccaggagaagaagaagacgaacgacgagaaccgggcggcagcgatcgcggccgacccgctcggcggtaagggcaaaggcggcagcgtcctcagcagcggccagatggagcggctgcccgaggtccggatgacgccggcgctgcgcgagctcgtcgaggagactatcaagaaccagatgcttgccttccccgacgccatcctccaggcgacaaaggagtcgtctggctccactccgacgtcgggtcgctcgacaccgggaccgtcggcgatcagcattgactcggccgcgctcgatgtctcgctgacggcgctgggcttccgtccagctcacgtcaagtcggttgtcagcttcctcctccgcgccaaggagcgtgtcgagcgaggcggcgaaaagcctggcgagcctctcgacccgcttgtccttagtctcagcacgctttcgcccgaggaggccgccatcgagtggctcattctgcacctgccggaggtgagtctttgaccggaccgcaccgcactctttgcggcttgtttgtccggcctactgacgtgcctctttcgaatcttcaggacgacctgccgaagcgcttccgtccgaccagctcggttgccgactttgtcagctcgagccgatcgtcaacgcagaagcagacgctcgtccaggcctggctggtcgagaagcttatcaagacggtcggcttcccgcgcaaggccatcgaggatatcctgacgctcgacattggagatctcgagtggcaagagggcgaggtcctcgaagccctcggtcggcgactcgtgggctgggaggcgggcgactggggtgtcgacgggacgctcgcccgcctgcgtcaaggcgtcgagcaggtcgacattgacgctcgcgatcagcgccgagctgaggagattgaggcgctcgagagcgtctttgacgaccggctccttcaggctccgctcatcgacggttcggccgttagccccgagatccagattgctatccctccgctcacgaccgacacgaccgacgacctcacgctgcacgtcctctacccggccaacccgctctcgtcgccatatccgtccgcgagtcatcctgcgacgccaccgccgttctaccttacctcgacaaccctcccttcctacatccgcctgcatctccaggcccagctccttcggctgtaccaagagcccgatagggaagacctccgcggcacgctcgagactggtgagggcggcgtcgtcttcgccatggtcgagtacctcgagggagtttgggagtctgttctcgaagacccgccttcagtcggagcggtcacgcagttccttgtgccgaaactgccggcggccgcgccgcgacctgcgcggacgaacggcggcaaggtccgccccaagcagatgcgttccctgcgaccgcgccgcgtcccgaccgaccaggagcaggccgcctacaaggtgcagaccgaggcatggcaggcaagcaagccgttccagcgcgttcttgaaggccgccagagcctgccagcgtggaaggagaaggacatcttcctagaggctctgtcgacaaatcgggttttggtcgtcattggcgaggtacggctgctttcggtctcaagagactgctacaggccaggctgacgccttcttttgcagaccggatccggcaagacaacccagttgccacagttcatcctcggtcggtttctcgcgctctccgtgacccgaggcgctcggatgactgacttctcttccttacgacgatgcagacaacgagattgccgccggccgtggttgctcgacctcgattatggtcacgcagccgcgtcgagtttccgctctcggtgtcgccgctcgcgttgcgcaggagcggctcgaggacgtcgacaaagcccagggcagcgtcggctatgcaattcgaggcgaacgtcgggccggtccaaattgcaggctcatgttttgcacgacgggtgtcctcctccgtcggctgagcgccggcggcgacgccaatctcgagggcgtctcgcacgttgtcgtcgacgaggttcacgagcggttcgtcacactggctttgtcgagacactcgcgctacgcagcgagctgatcgccgtgcttccacctcgcagctctgtggacggtgatttcttgctgctcgaactacgagagctgctgaagcggaacgacaccatcaaggttgtcctgatgagtgcgacgatcaaccacctaaccttcaccaactactttgcgcacccggatcccgcccctctgctcgaaattcatggccggacgttcccggtcgaggaccactacctcgaggacatcatcaagggcgtcaactaccggccctcgggcggctcgcgaccgaccgagaagcagtcggaggagcaggccaagtcgctccgagccgagtacgagagcataggcctcagctcaaacgacattcagatcctggacggcgtctcgcgttccgagaaggtcgacgccacgctcactgctgcggtcgttcagtacgccgttaacaaggccgacgatggtggcggcgtcctcgtcttctgcccaggtacgagcgcgcctccagaagctagtctgctcccttcggcctctgaccgcctcccccgctgcggcatcaacaggtgtccaagaaatcaaccagacgatccaggctctgcggtcactcaacctcggcccggtcgacatcctgccgctccgttcgtgcgccgatcgtttcctattgtcctcctaatcgctgaccactttcgcctctctgcagatgctcagctcagctcgcaggagcagaagcgcgtcttcatcccgccctcaggcggcgtacgcaagattgtcgtctcaacaaacgttgccgagacgtccatcaccatcgtgcgtctctccaccctacaaacgctgaggctcttgtcgctgacccgtcgcgctgcttgcttccaggatgacatcacaatggtcgtcgacgtacgtcccgagcctgcattgctcttgtccctcgcggctgatatctcttcctctttcgcagaccggcaaggtcaaagagacgcgtttcgagccagagcgcggcatgcagctgctcgtcgaggtgctcaccagtcgtgcggcgtcgcggcagcgcaagggtcgcgctggccgaacgaagcccggcaaggtagctcccgtcacctcggctgactcgctcatactccgaagctgaccgacccttctgaccttgttcgcagtgctacaaggtgttcacgcgccggatggaggagcgcaagatgcccgccttcccgattcctgagagtgcgtgtccctatacttctcctttccttgcaatctgcgcagctcactcgctccgtgcattgtcagtcttgcggacaccgctagaggctcttttcctccaggtcaagtcgatgcgggaggacgaggatgtcaaggcggtacgttctattggtgaccctctcggtctgccagatgccgtcctgacgcggcctcttctatgccttaccttcctgcagttcctctccaaggccatcgatccgccaaaggtcgatcagctcaacgcggcttggaagacgctcgtcgatctccaggcagtcgagggcgaggactcgacgtcgaggctcaccgccctcggccgacatgtacgtctgccgctaaactctgttccgacctgcgcatcgcagctgcaactgatgtcggtgctttgtagatggcgtcaattccggtcgacctgcgactggctaagatgctcgttcttggagcgatcttccgctgcctcgaccctgtcctgtcgatcgcggccatcctctcctcgaagccgctcttcctttccccgatggacaagcgcaacgaggctcaaaagtaagcgttgcgcgcgtgagaacaaaggacgacaaagtctgacgcccgcttccgctggctagggctcgcgccgcattcacgaccggcaactcggatctgttgacggacgcaaaggcgtacgccgaggcgtcaaagatctcgcactacggagcgctccgaaatttctgcgaggagaactttctcagccagacgagtatccgggacatcacgtcgtgagtgggcctccatcggtaaggaatttatgctctgcttgctgacgcctcagtgctcgtaggcttcgaacggactttatgggcgcgctgaaggagcttggcttctcgtcgcgcggcgcgtcggccgaactgaatgagaactccgacaacgagaacttgatgtacgtcgggtgtcgaatgatgtcgagtaaggcgacgtactgactctgggtttctgccgcttcttctagcaaatcaatcgttctcggaggcctgtaccctcgtatcgctgtacgtctacaacgccctcagcccttggtcgtagctctcgattctgacgccgctcaatcctcccggctctcgcaccagcgcgtcgacctgccgaaggccaaatttgaccaaatgatgagcggcacgctcctccgcgagcacgccgccaaggagatcaaattcttcgacgcaaccgagcgtgtcttcttgcatccggtgcgtggcgtcaatgtcgtaggcgtcgaccttccaatctgacactaagtgctgctacagggctccgtcctcttcggcgagaccaaaatctcgtcgggcttcctatgttactgggccaagaatcagacgaccaaggtcttcctccgggatgcgaccgaggtgcgtctctcgagacctttctcgcaaccgacgtctctgacctcgttggacggcgctctgcttgtgccctccttctaggtaccgctctacggtctgctgctctttggcggcaaggtgacggtcgtgcgtccctgttcgcgctctccctcagaaagcgagcgctcactgattcagtccaccacacagaaccacttttcgtcgctgctgatggtcggcgacggccaggtcaagatgaaggcctggacgcggatcggcgtactcgtcaaccaagtgcgtgagggcgaaccgttcagtggacaacggggcggttgctgacactccctcgcaccttacaccctcgccttacgctcagcttcgtcgtctactcgacgcatccgtcagttccagacccgccttctaccttcgcgtcaggatcgagtgggctgacagcccttacttctcgaacctccgcagcttcaagcgcagtttgacgacccgacggccgccgtcggcggcaacgaggaggtcatccgagcgatgctcgcattacttgcacagcgctcctgagtcggcgcggtcgacgagcgaagaggacgagacgcttgcacgtgcggcccttcaaaggtcagcggtagatggcttcgatgtagatgcgcttcactgctttgctcctctgacgatcgctgccaggctggtggacgaaagccctcctaagcgccacacgaacgaaccacagcacgaagaggcctcgacgcccgccctgacgacgtccgccctgatgcgaactggccgccttctttcaaagccagctgtgcctccatctgctatgcccccgtggccaactgcgcctcttccaatcgtcctctgccagcccacccaatcccgctcccgtagccccagtctgccgcgagtcgtcgttgtgtttttccaagccatagcatgcacgcaacagggtcgcacacgcggtgaagaaagggagcacggcgggcagcccctctccccaggagtcaattcgggtcgtgagtttcggcggatttagatcgtcgaggggctggcggaagggaagtagatgtggtcagtaggtgtccgagagaagggcaacggccatgccaaagggtgacgcactacagcatgatccggcacgaagctccgaagagacgcggaggcaggttgacgcggaacttggccttgacggcgcccgagttgccgtgcgagcgcgtgacgcggccccagatgacgcggatcttggtgccattgatctcgcgcttggcgcggtagacgtaggcgacacgcttgccgaggtagaaggcagcctcctccttggcggcgacaccctcgatctggagcaagctgcgggcgggagaacgcgaggggaggtgcgggtgatcagaacggaaacggttcgacatgcgagcgagcgagaagcggcggcggcgggaggtcgaagttcgagactgcgtccggcgacgttcgaagtcgtctccggggcggcgcgacccagctagcgctggccggtcctgcgcggcgaagccgtcgtctcctcgggatgaaggaacgagcgcgcgctccctccggtaacgcaggagaagcagacgggagggctgaacgggaccgcagggcgagcatatagtccctgccggcgagcatcctgcccacccgagcatgctggacgagcagcacgaggcgttccggtcctcgcccgcaagctcgagcgagagccagcactgacccggtccgccctcgccgccagccgccctgacacgcgccctcatcctcttgcccttctcgacctccactccaaggttggcaccggggccaacgtgagcggcctcacctggtgttaggacgcgagttccgctttccgcgcttgtggccggtgatgcgagccttggtgtagaggcgagtggatcccatctggagcgagcgagtagaaagagggtaggagttggaggtcgcaggtgcggttgaggcaaggtggtcggccggaggcggcagcagcgacaggcggcagcagcagcaagcacgagcaggcgaggttggcggaggggcggcagcaagcagggtagcgttcgaaagcggggagcgagcgtcagccgaccggtcccagctctcgcgtacgacccattgagcggccagacggaccttgagcttggtggtcttgacggcgtacaagaaacgagacggctgcgagctctcgagacgacggagcgggccgggccgacggcggcctgcgcgcgcgcggggcagcttgagccagaagcgatcggctggggaccaagcccggacgcttgggcaaaagttccgtaacaaaaacagccgggtatcgcgtgaaccgaccctcaccaaaagtcaggcggccctagtcggtcaaaccacgcgagttggcacgtctgaggggcacagatcgatatagaagatgctctatgacgaggaactgattagagaggggccagtccggagcagacaagccgctgtgacctcaagcagcagatacgcctgcctcgccccggccattgatgccctactcttgacggtaagattgagagcaagctaggaaccgctgctggtacgacagattgcagtcaggacctgcgaggagcatgtcatggacagcagacgacgttatcggcgggaagctcagcggagggtaggaaggtgctgcgcgaggtgggagaatccgctcgagctcagacggcgcacgatcatgtcgggcaagagtgcatacaggctggcagcaataactaggggtaggtagagggtgatgtctctcgtcggcccgccgcatgccctctgacgaaggcagacggaaagctcaggagcggtcaacaagaggccaggcgaggcgaacggcgcgaacgtcgcccgtcccctctggacccctcgcagccgtgattcccaggccgagcgagcagtgtgtcggtctcctctcgctccgttacaacggtgcccgctgtacgtgcgggcagttgtgcgtccccaaaggacgcatcgagggtgggagaccggtggcatcggccacgtcctgaattcgcctctacagccgcgcgcgcctgctttgattttccgcccggacgtacgcatccaatcgagtgggcactgggcattgatgcaggacgccctataggaagagcgaccggtccttgacggcccgcatgcccgtctgctcccactcgcccttgctgacccacgtctcgttgacgctctcgagccgggcaaagacgctcgtccccttccagacgagcagacgcgggtcgacctccctcggcgcagggacgaccccgacctcccagccgcccgcgacgagcgccgggtagtcgcgcccgagccgggcctggacgcgcgaggcggtcgccgagccgaggccagagatgagcgccccgccgccgacgacgaggacggtcgagccaaacttgcgggccttgtcgtccgacccggctgagacgagcgcatggacgacggcgaggtcgagcgccgtctgagctgcgtggcgccggacgtcagacgacgacagctcctctaccggcggggcggcgatgtcgtccatattcccgactgcgggtgctgctgctactgctgcgggtgttggcgtcgctcctccacccttttcaggcgacgacattgcgctcgggctcagccttgccgtcgatggcgccgctgagagcccgccaggggacagctcaactgctgttgtcggatgcgtttcgtccagctggggcgtcaggagaccatcaccggcgacggcacgggcggcagccaaggttggcggctggtcgacgagattgacagccgcgggtgacggtgccggtcggagatgcgctgtcgagagctccatcgcagccgactggcggaaggcgcgaattgggcatcagcttctgttggccagatctctaaggatgccgccccggcaagacgcaccggctgatcgagcgtataggtgccatccaggtcgtcctcgatgctgtcctgacggccacgctcgcgctcgttaagcttggccacgaggtcaaatacgcgagggtcgaacaggccctgtttcaaacaggcagcgagaggcgatcagaacgatgtaagaaggtcggcgcacagtcccctcagacggaccattgggcacaggatcggatcgtcaaagaccttgaagtcaaacttgagcgtctccgtgctcggccggcggacccaaaactcatgagcgttgacgccaacttgttgctagcggagtgagcacagaggcgaaagggagaggagcattcagcaacgtcgcagatcgacagcagaggcgggacgcacctcgttcagcgtgcagagcttctccttgagcccctggacgagcttgaagtcgagcgggtcctggatgtcgagctcagcatacgggaaggccgaccgccggaggagtgcgccgaaccaggccgtcagatcggcgccgccgtaagcgagcgtttgcctggcgttcgcggcgtcgccggtcagcagccaaccgcgcccgtacgagccgaggaggaaagaccaagaaagcacgcacctcgaatcggcaacgacgagcccatcttcgacgcacccgattgtcgtcgtcgtcgccccgaggtcgacgacgcatgccgcactgagccctgcaccaaagctcgcgccgagcgactcttgaaggagcgagagctggcggaagccgagctttgctaggaggaggtccgaaaaggcacggaggtaggcgtgcgaggccgagtcggggacgacaagaatgaccgaatactcctgccgaagggagggcgtccaatacggagtgtcagtgatggaggcccgcggggttgacaagacgctcgaaagggctcgcacctcgtggtcggccggctggacgtcaagcagctcgagaagcgcccactctaggatcctgtggacgtcgcctgtgacagccgcctcgctgatgtagcccccgctcagccgccggtcgacgatcggccggcagatctcccactcatcgccggccggtacgcggtcgagcgcctcgccaaaaatggttgacgatgacgacgaggcagcctcgtcgtccgctccgccgttgctcatgccgagccactcgacccggaaggggtcgttgaagtcttggatcttagtcggccggacgtcggcgttgtagccggcaacgagagatggtccggcagggaaggatcggagctggagggcagccgtccgctcggcgaggacggagcgaaggctgacaatgtgctcattgatctgggatagacagttcggggttcagcgagtgccagccaagggtgtgcaggctgcggaggcaggttttgacctcatccgacaactgctcagcgccgtcaatctccatcgactcggccccatcttcgcggcgctctctcttcttgcctttgccgccggtgctggtactcgggcaatctgacgaaggacaaggggtccgccgccggcgagcgagcgccatcggcacctctttcggcgcgtagtcggtcgctcgaccgatgcggagcgtctcgcttcctggatggatgacaatcgtcttgctgcctgaggggatctgttcatgcggcggagcaatgcagaggccggccatgcgtcagcgcaaagatcccatttccggcagcatcctcgagctcgagctcaggggcaggggaggtcgggacccgtacgcacgccaggaacctcggccgcctcggcctcggccgcttcgcgtttgcgcttctcgccctggacagccgtcctcctcgcccaggtcgtctgggtctcttgcttctgatagccggacgacatgttctttgtgttgaccctaagcggccgggcaggagggagatgctccggagcttgtcagcgtgctcgaggctcgaggacgagatggtgctttctcgaggacggactggggagggatgtggaaggtcgtcatcttgaacgccggcaggttgtccgggtccttcttcttgccctttggcatgctgggcgagagttgtacgaggtcggtgtcggcggccaagatggctggcagcaggacgcgcctcgaaggacgcgcccttcgacctccctccgagctaccaccacgaccagcgacctcggatgctcgccatcaacgcccagcaggtccgcctcctccgcctggccgttctctcgctcggttcggccgcaatcctcggtctcctcttcctcctctccaactcggtctcgagccccgtccagcgaccgctctcgccctggagcgaactgccaccgccgtcaggcgccggctccaaatggacctggacgccgaatcatcaaacaggcagcgcgggcggcagcagcagcagcagtagctcatcgagtgggagctcgcatctctctggcagtgtcctgttcgagggcaacatccccggcgagcatgggcctgagtatgacgcctcgaccggccgcttccggtacgggcccgacctgccctggctcgagggcggcggtcgcgaacgccggcgcatcctcgcaggctcggcttttggcgctcacgaaggtacaccctcagaaccccttgttgaatcgcgtgccggggcgagcgacggcgctttgtgctgcccggcgcgagtcgcgccggtgctctcgtcgaggtcagcagactgacgctctcacccgtcccttgaccatccggccggccgcggcagatgtctacgtctcactcctcgactcgatccggcaatttactcagtcgattcgaatctacacgcctggctttcgctggggtttcgccgacgtcgtcagctcgctcggcatccacaagggcccgtaccacgagccggtcctgctgccgaacgacctcggccgcagggacctcttcgccggcgagaacgcgggcaagaaggccgacatggtcatcctcgggacgtgcgagtttgagtgcgttgcacgcctccgtttgagttgcgcgtggcttgcccgactgacggcgtgtctgctcctctcccccgtgtgttgctgcgcgatccctcagcatggagtacttctcggccgacctttggaagcagtgggaggctcgaccggccgacgacaagtttctgcttgtctgtgtcgtccacaatgcctttgcgaccaagtggctggccgagtttggccagaagtgggtccaggccggtgcgcttcgactgatgccgatctcggcccagtgcgttcttccccccttcctcctctccctgactccttgaggccaattctgacctcctacacttacacacccagtgtcaagcgagcctttatctacgccctcgactcttacgccgacatgcctgcgctccacaaggccggcttcgacagcgtaccggtccacgtccacgtcccgctccttccgcttcagctcggccggcgcgacccgccacagaagagcatgctcaccaacgccgtcatccagggcaactttgatccgaatcggcgcgactatgccggcgtttttgccgacctgattgctgagctcgagctcgacccgaggccgtggggctaccatcgggtcggcgccggcaaagagttccacccgaacccgacgccggccatcacgccgttcgtcctccatctcgccggcaacggtcagatgacggtccctcctgagctctccaacgtcgtccgcgtccacacggggctcgcctatgacgacttctttaagacaatgcactcaatggacgtcgccctcctcgcgttcacccaggcgagctcggaggagaccaaaggcggctactacgaggtccaggcgtcgtcctcggtcgcgatggccatgatgtgcgaggttccgctcctcgcgaccgcccgcgtccaaaaggtctacacctacacgcgcagcccgctcgtctcgatcacccggccggcctactttcgcgaggtcgaggccatcaagatcctccgcgccggcttctgggaccgggccgactcgacggcgacggcaacaggggaagaggacatcgaggacgacaccgctgcgccaactggcggaggcgcgggcggcggtgtcatccccccgggcgtggctgagcaggcgcagcggatgattgacggcggctggcgccggtccgacgagggctggcgccagtggcggtcggtcgtcgaccgcgagaaccgcgaggtcgcccgccggcttctcctcggctggtagggggcgtccgggcacttgcttttttcaagggggtccttgcgggtgtgtacttatctcatatctggtctttttatctggcaaatcccgcggtcgccttcagcaagcggtcgaatgtagcattggctgacctgatcgacgaggcgcagagcgctgcaggtcgtcagaaagcgctggctctgccaggggcagaagacgcctcgctcaagccgtgtccgggtgcgcggcagatgatgcctgcagtatagccggcgagggagcgagggtcgtttctacgggttgcgtcaacggacgttgccggtcgtttggacgtagtttgacgttgagagcggctggagagccgcatcaggccggcgcatgccggctttccaaggctgccgggcctatgtcgaggtgtcagtagcttccagtcgcccgggagggagccgagagggtcgcaccttgcggctgtgactagtccgcgaccgtcttcgacgcgtcacctctcccttagcgcttaaagccccgccgcgtgtcgagatagccttcgtcgtcggccgacggcggcctaaacaagcccgggcccttctcggaccagtggctcaagctcggcttgtaccacttgtaaggtaagtcgagcttgctcatgtcgatgctgacgatcgggaggtgggagaggagccgccggtagtagaggtggtggttttttgggaaggcagctgagggctgggccgggtggccggcgagcggcggctcgaaactgtctgctgcttgagccggcgcaggggccggagagggcgtcgtcgacggagtcgcagcagcgagttgttcgatcgactcgcgcgtgacaggcggccggaccggcggccggaaggtcataggtaggcccttacccgccttggcctcgagccaatcgagcacccgctccctcctgccgtccgcaaacgccgaccagtcgacgccgagcgccctcagctttggcgtcgggtcctcagccgccacggcgttgctgtcgtggttgaggagccggacgacgagcgggtagcgcatccgcggccagccaccttcggtatcggtgaggagctcgcgccagtagcgccagcgcgcatgcgcctcgcggtcgggcatcatgaacggccggatgtagagctctgagctctttggccggcctgccggcggtagcgttggcgggagcgagagcatcggcgcgggcacgggcgtgtcgcggatgacctttgagttgagcagggcgacgagcattggcgagtacgccggcggaatgctgtgcgggttgccggcctcgatcggtttcgccacccgcaggaccttggacgagataaagggctaccagttcgaggccatccaacgcgaccgggtcagcgttcagaagtgggatggggcgggcaaggccggcggcggaaacacgtacgtctgcgaggtggtgccgggccttgccggccaggccgtatccctgcctcagcgaccagtcaaagtcttccgggatgcagttggacgctcgctgcaacctccggagggcctaatcgtgagtgagcgagtgaggaatgcaaacgaggcaagcagcaggggaccgaaggaagagcgtcagcggtcgggtcaggcctgcgcaaacggcgcgagcagcgagcccaagggggaagcaccttgcgggcccggtcgagcctgttctggacttcaggcccgtcgtcctttccaaggagcttctttgaccgcgctcgccagtgagccttgaagtactgcctattcgaacgaggcgaggcgacgagtcagcccttcgtccatcctcgctcgaaaaggggtcgtcggcgggcgcaggccctgacgttgccggcggccctccggcaagaggcggaaaacggacgcgacatggtcgtctgggtgagcggccgctgcccggaggaggtgcctgtagatggtctttggcggggcggtcgggtcgagcggcctggcgacgagcttgcaggcggtcatggttggaggagagaccggcagacgaccgaccatcttcgaaccggagcatagcgtcgacgacagccatcacgacgacacacagcatggacagcagcagcaccgagcccgtactgaggacggtcgaccggtcgttccctcttcggacgacgagcggtgcgcgaggaccgccggccgctcttgcatctctcggctgaccctcttctctccgctagatgagccgcacgtcagcctgatgcggcgctgcctcgacctctcgctcgagagcgagccctcgccgacggccttctgcgtcggctcgctcctcgtcctgcccccgccacccctaacgtcgacctcggcctcgccctcgtcctcgtccgcgccgctcatcctctcgagcggcttctcgcgcgagcccccgcggccgacctcgcacgcagagtcgtcggcccttatcaagtttctcggcctctcgccctcgaccctcggcgagcttctgctcgagcagtcgccagacgcacggtgggagggctccgagggctggagtcacgaagacgtcctccgccgggcagactgctacacgacgctcgagccgtgtagcatccgaacgagcggtcagccagactgtgcgaggctgctcgcgacccaccagatccggcgcgtctttgtcgtgcgtcctctgtcgtccgagtctgatgttgggcactctagcccgagaccaaatctcaacgagtggcccgagggcgctgactgaaccccacccctctcacagggcgtccaagaaccgcccgactttgtccagtgcgaagggacccgtatcctcgaggaggccagcgtcgaggtctggcgggtcgaaggacttgaggcggcgtgcctcgcacacgcccggcgggggcgcgactgaccgactgactgcgaccgacgggcagcaaagcgggagcgagagagagaaagggtggaccatcttcatgcaatgccgtccttctcaaactcgtcctcgtcgtcgtcgtcccctccaatctgaacgaggcctgacgcaaagacgtagacgacaaacgtcaccgacgccccggcgacgtagagccagcgcttgagcgcaaacgcccgctccttcgtcgcggcgtcctttgcgtcggcccctttgccggtggccgcacccgctcctgttgtccgtgccgccgtcgatgacgctccccacaactccttagcgaccgtcggcagggccgcaaacgagctggcgaggagcgaccagcccgacgacttggcgtcgcgcctcggccggggcggccatgcgtcctcgtggtcgggcgggaagcagagcgagaggatgcggagcgtgtgggcttggagcgaggggtacgtcgaccggacgaggtcggcgagcagcggctcgggccaaggcgggaggaggatgagcgcgagctggctaaagagcgcgaggtcgaccgtcgaaggctggctctggccaaagaagaagtcagccgggccgaggacgtcggcgagcaggtcgagcgtcgtctttgcccgcgctagcagctcggcctcgccaaacttgccggcggtccggcgcttgcgctccttggccgaggcctcgactggcgtgtcgacccggtcgacattcatgatgccgagtccgtcgtcctgccagcccttgctcgactcttcgggcgcaccgagctgccagagcccgacgtgcgtcagccggctggcatgcagcgcccgaagccggctcggaaggtagtgcgactgcgggaaggggagcgcgcgggcgaggtggccgtggacgagctcggcgttcttggccgacgagtacatcgtgtacgactggtgtagcgggcaagttggcgggtcagcgacgcctgccttgcttggaacggcccatgctaacgggaagcgccagatggacataccgccagatcggccaactctgtctggatgacggccgaccacgcgacggcctgcgagcgttccagtgccgaaaggcctgcgtcgaggtcggcccctctcgggcagcgggtcggcgtcgacggcgtcgacggcgccgacttgcggctcgctccttccgcggcggtcgtcttctgtccaagggcggcggcggcggcagccggcagatgaggagcgagcgcgacagccgagggggagagcttggcgatgtaggctaggatgtcggccggcgaggaaatgacctgcgagccgtgctcgaggtatggcagctggcctgcaagatgagaagcccggaatggaggagtggtgagcgagggcggatgcgtacgggcgcacgcgggagggcaccaccgccgccagcagatgaagacgacgacgcaccgttcggggacgagtcggggtcgtttgactcgttgagcgtccagcgggaagggaaggctggcgagcgtcaactgagagtcagtcgtctgatgatctcgggacggcagcggcagcaggccatcggtgaacggaccgagctgaaggtagcaggcgacctgaatcgacgccgggtcaaccgacggcaggctccaggcaccggaccaggtatgcactagaagagaagaggacccgtcagctcgcctctcgtacgctccgggctgttcaacaggaccgacgggttaggggttcgggcgacatggtggttggaggtcaggacgagcgggcgagcggtgatcgaagccatgaccgccatgaccatcatctccctcgtacaccgacccagtaaatcagatttcgctctatcagcacagcagccagcatgtcgactaagctccagccgctcgagccgatcctcaaggtccgtcgtcgccgtcgcttctgccttgcccgttcgtccctcgcgcagcaagaccgacctgacaactcgcccctccggccccggcaggtctccgactcggtcacaaggatcctcggccagaaccccggccgtttcaccctccaggggaccaacacgtatctgatcggccagcgttcgccctacgtccttcttgacacgggcgagggcaaggctggctatctcgcctcgctcgccgccgccctcgggcccgacggccgcatctcgcggatcgtcctctcgcatgagcatcgcgatcactggggagggctccaatcgacactcgcacttttgcgcgaacggcaaggcgagcggccgactgtccacaagtggacgaacgtcgcgtatgacggcgcaatcgtcgacgccatgccggccgggtcgttcaagccctcggctgacggcgaagcgctgcatccgctgaccgacggccaggtgcgtcttccggcgaccgatggacctcactgtctacgagaggggctgacccctacactccatcttccgcaggtaatctctgccactggctgctcgtttacagtcgttcatacgccgggccacaccgacgactcgatcagcctcgtcctcgacgacggcgccattttcacggccgacaccgtcctaggttccgtccttctccactctcttcgtttcctcagtccctctgctgacgaccgctcccgtctgcgccgactcttgcaggccagagcacggccgtcttcagcaacctcgcgacctacctcgcctcgctccgcgtactcgcagccctcaagccaccgaccctctacccaggccacggaccagttgttgaggatggcacagccgcgatcgagcgctacattgcgcaccgccatgagcgcgaggaccagatcctctccgtgctcgcgcgcgacgtgccggtcggcgcgcagatgccgggcgattgggcagccgccgctgccgtcggtgccgcaagaggcggctggtcgacagaggccatcgtccaggtcatctacccagacgtcggtttcctcctccagaacgccgccggtcagggaggtgcgtccataaagcacggcggatgagctctctcgtcagtcactcggcaggctctaacgaggctgactgccttccccttttcattcccagttgacctacacctccagaagctggccgaagagggcaaggtcgtccgcgtgccgtcgagcgaggtcgagtggcgcctgaggagcgacgccgagtaagcctgacagctcccagcgcgcgaggagcccgcagtaagaagcaaggagcaaggcgacgtggccatcgatcgcactacgccttgggcccctgcatcgccgccttgcggtcggccccgcgcttcctcgcggcattctggtgcccgcgcgagcccttgttctcccctcgtccgccacgcccgccccgactgccgccaccgcggtcgcctccccctcctcggccgcctttcgctccccctcctccaccgccgctgccgccgctgccgttcgtgccattttgcgccgtcgtcggtttcacgctgttggccgagctggccgaggcagagggcgtgaacatgccgagtcgggcctggattgaagccattcgtctggggttgcgctcgagcatgatccgccagccttcaatctgctcgtcactcaggcctgtgcaggggatggaggagaagcacatcagtcgctggaggcacgtcaagaggaaagagagcggaatagctaacccgtcttttccctgagggctgcgcggtctttgccccgccgggtcgcgccgtctcggtcaaagaccttcttattcgacatgtagagatcctcaagcaagccgtcagagtcgacagggaccggaccagagggggcctgtgcaagagcggtcaagggacagtctggtcagcgagtgcaggcaagcgagcgcagcagacttaggacgtaccgcccgcgtcgcgtcctcgtcctcgtcgtcgccgctctcctcgccgtcgacgccgataatggccgtcccgcgcatgcgagcaccgacgtgctcctcctcttcgagatcgtcgtcgtcgccggccgcaactgccttgctggcaaccgattctttggccgtcttgtctgccgcgaccgccgcccggcgcgaagccagccgctcgcgctcctcgcgctcctcctcctcctgctcctcgcgctgaacctcgacgaggcgcatgatgctctcgcggaccgactggggcatcgcctccgagatctgggggacgacttgcgacgtgtctttgcggtagacctgactcgagtcgacggcgccgcccgtcgcctgctcggcctgctcgcgccgggcccgggcgagggcaaggaattcggcctcgtcggcagtagtgtcggccggtgtcgaggagctggcgaccggcaccgagtcctcgatcatcggcgctggagccgagaggagctcgttgagcgcgtctgggagcggggccgagtcgaagatggcctcgatgatgcgctcctcgatcgatgtcgctggcgcaccggccggcgggggcgccgtgaagtatgggtgagcgacggcgccggcgatgaaggcggccgacaggtcgggcaggatagactgtatctgctcgatcgaggcgaggaccgccgggttggtcggcgatgcaggcttggacggagcgcccggctgcaagggcaccaagttagcgacggcttctggccaagcacgaccagtcggcgacaggcactcactttcgagggatagacagtctcggcctgctcgagccggagcgcttcgacctcccactcccttcggtcgccctcgagctgcagcagctgcatcgcgacgtcgccaaagccgggtgcgtcaataacgcggccagaaaggctaaagagcgtctcgccgtcggaccagagcgacgtaaacggccggggcagctcgtccgatggcggcggaagggcagcaacgatggcctcgagcggagggagcggcgtcgagccatcagagtcgtcctcggccgaaacgccgagcaggagcgagagcgcatggaggcagaagagccggaccgagagcatcgcctggtccgaggcgtaggtccttgcgagctcctcgagcacgctctggacctcggatgacccaagggcgagcatggcatcaacagctgcccggctgcccattctgaggagtgcaaagacgagcacaacccggagcggcgaggcaggcgagccggcaccgagcgaggcgacggccgaggcgagggcagcgaggtcagccctccgctcgtcgtcggtcgccacccaatgcttgccgaagagggcggcaacggggtcctgcgcgccgggaccgccagcggccgagacgtcttgcggccaaggcgggcagatgacggcgaggtcgagcaagacctcaagcggcagctgcgacgacggcacctgctcagcgagatgaagaaggacggggagctccgaggccggtggcgacgacgacgtcaggttggcgaggccggccaggtggcgctgggcgaggtggtgtgcccacgactgcaatgagtcggctaccatcgcgggagaggagggctattgaaggtcgagacgagagagacgatcgaggttgaggtcgaggtagcgacagcgtgagtcaagtcgtcgcgctgcttgcccggagccggcgtacgttcggcggcggtgcacatgccccacgcttctttactttcgacgacggagaggatcacgagattcacagaaggaaggagggcatgacggtcggtcggcaggaggtcgtaagggtctggcgtgatatggctacaagggggaattagaggaaaggggtatgaggggagacgagctccggtagattcaaagcaaaagaagaggagcgaggtcttgaggtgcgagcagccttctgcccgctcagccgaagagctggatggagcgagagggtcagcacaaggctgcgccgacacaaatcaaaccagggacgtaccgcctgaaggtcctgaacagtcatacgcttgagctttgcgccggtgccctcgccgagagcggcgtcgctctctttctgcttgcgctcctggagggcgaggatgcgctgctcgacggtgtcggcgacgatcaggcggttgacgaagacctggaacgcggtagagtggagtcagcgatgggcgttcgcagagcgaagcgactcgacagggacgcacctccttctgctggccgaggcggtggacgcggtcgcgcgcctgggtctcagtggcagcgttccacgcaagatcgagctgaaaggggagatgtcagcatcagccaaggagtcaaaggacggcgagaaggatctgcgagtccagccgacgcacgttaacgacgcggttggcgcggacgaggttgaggccctgagcagacaagtcaagagtcagcaaaggaagctcatccagagcaggcagtcgcaaagagtaagagacggcaacgcacgacgccaccggccttgagcgagagtagcaacacctgcgggttcttgcggctgttgaaggcgcggatcgtctcctcgcgctccttgcggttcatccggccgtcgtaaatgtcgtacgacaccttctcgatccggaggtagtcggcaacgaggtcctggaggcaggaagacatgacggaggatcagccgaggtcgcagcgcgacgggtcgaacggtgagacgcggtttacgagcatcgtcgtccactgcgagtagacgaccaccttgtcgtccggacattcggccagctacgagagagggagggacgcgagttgaaagaggggtcagcgctttgatcgagaagacggccgggacgagcaggaggcagggcgtacgttcgtcttgaggagcgcgagcagcgccttcatcttggtcgagggctcgatgacgtcgtcgtcctcgaggccgagcgtctcgtagagcttcttgcggtgctgccggtgtcgagggtccatcatgatgcggtcttcctgccaccaggggacgagctcgtccttggcgacaaagtcttcgtcgtccgagtcgaggacgcggcccttgcccttgcccttgcccttcactgcggtcaacgagagaccgcccttcttggcgccggccttcttaccgaggaagggcttgatctgcgagggcaaagggtcaaagcaaggcgaggatcatcagcaccaggcggcagcgggccagtctagagtagaaggacaaggcgacgcacgtccttgtcgtcacggccaaagtcgtcctcgccccgggcgccgctgtccgacatgtcgacgtcctcgtcgtcctcggccttgtcggcggcgacgatcttgtcctgcttcttgagctcagcgtcgacctcgacctcggtcggctcgagcggcgcggtcgcaaagatcatgccgatgtcgaacgggctgaggggggcgggaagagggctgcacgtcagctttgggtgaggaggacgaggcgagaagggggaactcacgcccggcagctagggcaggaccgcttgttggcctgctcgacgtcattgtcgccgacgacctgctggacttgctcaaggacatcggtgacgcaggcccggcagaaaaggtggccgcaggctgcagcaaaggagcatcgtcagcttgtgcacggggccgcaggcatgagaggacgcaccagtgatgacttcctcggagatgcgggagtcttcgaagcagattgcacacgcccaggcttcgtcgtcgatctcctccccctcgagctcggcgatcgctgcgtcgagcgcccggtcaaagagcgcctggagcaggatgagcaaggaagcgacgaggtcagcttcaggtcgagaagccagcgcaagatcaagaaaagaggcaacggaccttcttgtgcttagcaatccaggcatcaccgtttgccttggtcgcgcgttcgagttcggcagcggcgtcggggttcggaacagctgctgcagcgtcggcgtccggcgcctcgtcgtcatcgaccatgatatcgtcgggtcgcacctcgtgcttggcgcggacgaggaggattgggtggttggccgcctgccgcaggcggaggagcagcgtgaggacctgggtgtagttgcgcatgaccgtgcccttcttgaggaacctgggggttagggcaagcgaggacgacaaagcagcgagtcagcgcgagagaccggcggccaggaaagggtgggcgcagggcggcgcaccgattgaattttgcccgagcgcgctgctcaagggccgtgtagatcgtccgctcgtccggcgtgaattcgagcaggtcctcctctgcggatcggggagggcgcgctagcgtcaggaacaggaacagagaccgaggcacggaagagcgaccgactgatgtgcttgggcttgagcgtcaggatcggcacgccgtcgatcttcgagtccttgttgcggcggatgaggcagaacttgaggatcgcctgggtcagaccgcaggcaggacgtgcgcgcgagagtcagcgacaggagctcaggccgcgcctgaggctagggtagacagagggcaagcgttgcgcacctgggcgcgcgaggccgcgatcgcagggctgcgcttggccttcttgacgacgtgagcgttgaattcgctccaatcctgccatggccggatgttgaggaactggacaaaggcagaaccagagcggccaggtcagctgctggcgagatagaaggctggccggaggcagacgcaccttgagtagcgagtacaggtcttcgaggccgttcgtgacgggcgttccgctggcgaagccaagcggcagagacgagcgtcagcggccgagcaggaggcaagtcgcagcagcaggcgagacgaacgtcagcgcccagcggaactcggagttgatgttgaagcaagcctgagcggcccgcgtgttgcggttgcggatctgctgggcctcgtcgaggatgacgcggtggaagttaatctgggcgagcgggcccttcttgaggtcggcgttccaggcgtcagagtccgagtcgctctcgacctgctcgccctgatgggaggagagcgcatccgagaggatcagccagccggcgtcggcgaggcggacggtgggtcgaggcaacgcacccggtccttgcgggccttcttccccttcttgcgcgcgatcgagtgctttttgtaatccgggaagtcctggacgagcgtcgcgtaggtcgtgatgatgactggcccgggcgaacagagagagagggaggtcagcggctgagcgtccaaaaatgatcgacaggcagcggacgcaccatcaaaccgcttgagcttcgagaccttgaggattttgtctttgctgtgctggacgtgctgatgacgagggagcgacagacgaacacgcgcacgagttagcgccagggcagaagcaagagagagccagacgggcgacgcacgatcttgaacaaattgtgcgtgcacttggactcgatctcgagcttccactggtcgatgagggcaaacgggcagacgatgagcgtcgtccagtcgtccgaatcgcgctcgggccgattggcgagcatgacaccgatagcctggacggtcttgccgaggccctgagggcgagcaaaaagcagaagaggcgtcagcgtccggctcaggaggtcagaggaggaaggagacgggcgcaccatgtcgtcggccatgatgccgcccttgcacttcttgtcctgctccttgccgagcatccaggcgacaccctgaatctggtggggcatgagggtgatcgagaagccgggcagcttgtcggtcgtgttgtccttgaggccgagcttccgggccgcctcggcgacgacctcggactcaccaaagtcggcggcggcaatgtcgaaaaagtccttgaggtcgcctggcgcgcggaagttggggtcgccgggctcctcggccgggtagtcatagccatattgcctgcgaccggtcagggcattgaagactgggtcgtacatgccgccgagcgcgccggcgccgagcgcaccgctgtagccgaggccgccagggctgcacaagacgaaaggccgagccaaggatggtcagttggagcagcgctcgcagacgtcgaggccaggagacgcactaggctggcacgggcgcgggcgcgaggttctgagtggcgtaaagggccttgagccgggccgagtaggtgccaagctgctccaggctctgaccgatgatggccacgtacgtcgcaatgacctgctggatgacgggcggaaggtcgcccggcgccggctggacgaccggcggcagctggagcaggcgcgggtcgagcggctcaatccgctgcgccgatgccgccatctggccgagcttgccgagacgcgccatgaggagcgtgtattgagcaatccaggccgggttggccgccttccacgccggatgaatcctgtcaaaagagcgagactcagatcagcgcttgagacgaagcggagagagggatgaagggggccagacgcactgagagtagaggccggcgatgctggcgatgccatcacgctcctggcgcatgacggcgagctcggccgggcttgcaaagcccgcgacgaaggcagccgaagcagcggcggcggcgagaggcggagcagggaaggctgggacaaccgcagcagcagggcgagcggcggcggcagccgcgcccgcgttcgacggtccggcggcggcattggcctggccggccgctctatcaaatacagcagcagggacaacgagcaggtcagctttagcgagcacgaacggacggggaggaagggcgacaaaacgcactttgcccggtcgatggcctcgagccgctcgacgtcgcgcagcgcctgctccttctcgcgcgccatctcgcgcgcggcgtcgtgcgcattccacgcctccgccgcgtccttcttgccggcaccgctgctgccgacccgagctgcaggaggcgccgccgggatcgggtccggcgacgaggcgcgcgccttgcccttgaagggcttgagggggacactgagctctggccggatcttcttgcgcggcgccagccgcgcgaccggcgagcccgccttaaccttcttcttgtcgagcccgttgttcttgtcaaacatggcggccttggcgctgaagtcttcgtcgctcgagtcggagagctcgatcagctcggctgggcgcttgcctgagggcttggacacgaccgagccgggccgggcaagcttgccgttcgacgagtcaacagtcttcgggacaaagattgtcacgggagacgacgagaggcgttcaaccttggccgacttgcggccggcggctctgctcgtcgaggggccaaagccaaagtcaaacaggtcgaacgacaagtgcggcgagagtgcgttcgccttagcgacggcccggctgccgctcgcgctcgcgttaacgacagtcgccgacgaaggcaagggcttggctacgcgcaacgatccggcggtggatggcagcggaggaaggcggtacgacgacggctttgactcggcccgacgcgacgggcctggcgaggcgtcgcgatcagactcggcggcgaggcggcagctgccagtcgccttgacgcggtcagctcgggcggcggcgtggtccggatcggtgcagtgttccttagaaggagaggaaggacaagaggcgagcgtcagctgagtgctcgagggtgccggcgcatgaaacccctttcatccgacttccctcccgagcagtgcctgactgctctcgcggccgagccaagcgtttccagcccaagcagaacaacgcctccaccgccacctggcacgcgagcacgaattgagagacaggaaggacgcacagcataagtgtcgaagctgccaaagccgcggctgaggccgccgtcggcgaggtcggggctgcggccgaggatgacgtcctggtagcacgactcctcgacgcagaggatcgagccaaagccgttgccatcgccggtcgtgacaatgaaggacgtgctgaagaggttggaggaaggagaggtcagctaggaggtcgagtgagcgaaggtgggcgggcgctcagaggggccgagcgttcgcagggcgcgcgtgaaagggacgcactcgttgggatggatctcgaggaaagcgcggaggcccgtcttgtaccagcccgggacctcagtcttcgcgggcgagtcgccggcgtccgagtagctgttggacgtcaggtcgatctggcgatgggcgagggcatcagctcggagggcagagaggagacgcgtgcgagtgaagcgcgtctcacgagcgacgagagatggtgcggacgcacgatatcggcatggcccagcgtcttgagcgcgatctgatggaacgtcggcgccatcgcggagccggtctgtgcaggtctggacgagctagacgggagtggcgggcagcgaaggcaacggtgagaggaggctgctgcgggtccgagcacgggcagggcgggatgcgatgcaaggcaggttcggtcacgatcgtcaacgatctggatacgtctcttgaggggctttggctgctctcgtcgtctgcgactgacctctctcctcgagctgacctttgctcgagcgtcgctggtcgttcgaggtgtcgaggtcgacggaagccctcatttccggcgcgtcctcggtcgatgccgccgcaagagggtcgtcagggtggccctccacaactgcatctagaattcggcgcaggcacatggccgacgacgacagctcagacgacgacctcgatcaacagcaacagcctccttcacgatacctggcgaccgttcgcatgccctccggtaccgcctcgcgctcgtcgcgcgcctccgtttcctcttcgggcagcgacagcgactcggacgacgccggctcggccgccgtcctccactcggtcaccgcgctcaacagctcgctctcggccttcgagcagacgcacatccggccacttgtcggtccggacggccgctcgctgagggacacgctcgctggcatctcggacgaggtcgagcgcgcaaagctgctcgtcacgctcggctacgtcatcgaggacctcgtctggagtgcgtccctgctgcctcagtcgacatgctcggaacgaggggctaacatcgcgccaacctgcagtctacctcaagacgaagggcatcaacccagagagtcacccggtcgtgcccgagctccagcggattaggacatacttcaccaaaatacaggacgccgtcaacccgccgaaacgtttgtcccgccgcattctcgaccagctgtcgaccaagcagcgcgcgagtcggacgctgactgacgcctgctccctgctgtcctcatccaggcacgatggccgtcgaccggcccgccgccgcgcgctttatccgctccgcgttcgcctcgaacggccagcgcgtcgaggaccgctcgggcgccgacgacattggcatgcagacgcgcttcaacgtcctcaagcaccaggaggcgattctccgccagcccgactcggacgacgagtcgtcgggcgaggaggtcgaccaggggcttgagctcatccagccgccttcggcgagcggcagcggctccggcgcgggaggccgcgcgcggccgtcagccgccaaggggaagggcaaggcaaaggcgtcgggcgatgctgcctcggacgccggagcgtcggtggcctcgtcctcgtcgtccgacgtcgtcgtcattgacgctggcgcgctcgagcaggccgcgacggcgacgaccgggcccggtgccggtgccaagcggccgtcaccgcaagctgccggagcagcaagcggcaagagcaagcgggcaaagatagacccgtttgctggttacgactcggccggcggcgctggatcgccctcgtcggcaggcaaggctggcaagtcgccagcggggcggaagcggtcaaccaagtcacgcgcatgagactcctgtgctctctcggcgtgccttcttctgagatgtcctttcatgaccctgcacgcgctctcttcaacgcctcaaaaggaagaaaggcgcatcctcatcgcccgcgttaaaggctcgctgcgaccggcctgctcaggcaatgggctcaaggcgaaggacaagaaggcatgtcaacagggctgcagggagggggcatgggcgaggagagaggagaggaggccggggacaggtgcagggcacggtgggcgcagttacagagaggtggatgtcgcaacaagcagagcagagggggagagagcctatcgagggagtaagacctgatgttacagtgggcgaccggcgcgggacgggagagacgagagcagagggaccagaggcagggcaaggcaagacctgaaggaagaagaagcaggacttttggggaagcgaggaccaggcgatgtgtcgtacagtccggcatgtatgagtgtgtgtgtgtgtgtcgtcagcttgaagagagagagagaagagagagaaggagagaaaagtcgctcgcttcgggtccgcccgcgctcaaagcgcattcgagagcgaggacccgatgacgacctcgttgagcgggtcgccatccttgccgctgctaccggcgtcgtcgcctggcccgctcagcgcgtgaaagtacgagtagccacttccgctcgccgtcttctcgtggagcgaacccgcgtgagcggccgacgagccgacgacaatcgggcccgggcctgccgtcgctgccgccacgcccgtcgcgtgcagcggctggacggccgatgagctgcgccgccagaatgagcggccgagcgacgagtcgggcgagtcgaacgagccgtcggcggtggatgcgctgccgtccgagaaggcgaggtcggggtcgccgcctccgcttgcaccgctgtcgtccgttccgacagccgctgcagaggcgttgacggcggccgacgtcgacggctgaaagcgcgggtggtgatgggcaaaggccgagagatcgggcgtccggaggtgaccgagcccgccctcgtgctcatgccgcggtgccgtcggaggcgggctcgagtagtgcggccgcggcgtgagtgtgtcggcaaacgagtggggcgggggtgggaaggcgcccgtcagggctgagaggtcggtcgggagcgggtggcacagctcgaccgtgtccttcgacaggaggaccggccgccggccggttgccatcgagggcgacgtcttcagggtcggcgaaggcggagcaggctgagacagcagcgggctgtgcaccgtctcgcggagtggcatcgacgtcgccgggccgtacggactgctgaatgggtcaaagaccgatgaccgctgctgctgctgctgctgagcaccagagcctccgccagtgcgctccttcgcagctgagcctggagccgaagccgatgaatcgctggtgaaggagctcgcccgctggccagcaagagggacgaaagccggccgagtcggcgttagaccgctaccggcgccggtcgcccgactcgtcgccgaccgggaaagtgggccactgaggccgtcgcgcgggtccgagggaaagatgggtgacgttgccgtcgtcgacgatgccgagggaggcggccgcggcgacatgccgatgccagcgagcgccgccggctcgaggatactcaggcggatctgatccagcaggcaaggagggacgagctggtcagcacaagagcaggagcaacgaggtcagaaggcgaacgcacctcgcgtccgtcaaacgtccggccctcgagactgcgttttgctcgctcggcatcggcccgctggccaaatcggacaacagccgcgttcggtcggtcctcgagcagcgaggggaagaggtcaatcgagcggacggcgccggtaccggctgcaccaaacgaggagaagagcgcctcgaggtcatcggccgtgtggaagacaacgggactctgcaggggcggtaccaagcatgagccgttagcaaggctgttcgataacgggtggcgaggcgcaaagaagaatgcaccatgttgtcgaccagcagaccgacctcgccaccgccaccgttgccattgccgttcgtgatgatacgctttggccgtctggcgtcccacgctgccttgccagccgcctgctgctgctgctgcaggttgtgcggcgtgcccgacccgccctgctggtggtacgctcctcctcctccaccgccattgttgccgagagcagcagcagcagcagaagccgcgcccggcaagcccgaccagaagtctctcgggtcgtcgccatcggccacgccggcgatccggccgatcggctggccgagcgcccggagcgcatcgtagtggctcgccgggggctgagcgcgtgacgacgggagggccgagcggccaggcggccggttgagcgagccgagggcagcgctgccagggtcggggactgcggaagggagggagaggggcaggatgtcagcttcgcctcctttgacgagccaaggttgaggacgcaacggtgtcgctgggacgatgtcttttggacgactgagtaggagacgtcgaggacgtagtcactgatgaagggcaaaagagaaggcggcagaggtgaggcttagtctaagacggaggttcagaaggtgaagaggcagcctcaccggtaaacctggccgtggagattacgcatcgctgccgtcgcctcggtcccggagcccatcaggatgaacccccggcgccgggcgctcgagtcgaggatcgcgaggatgcacgcatggacgacggtcccaaacggctggaagaggccgagcatctcctcgttcgtcatgtcgagcgggaggttgaggacgtagaggtttttgcgctcgatcgagggctcgccggagccgctgctgctgtcggcccattcgccagcgtagtcgcctgccattgtccggcgctggtcttgcgttaagtggagctggaagcggctggtcgatgccgtcggcgaggtcgagccggtcgcagaggccgaggcggacgcggcaggaggtgagagcgggaggagtccggcttggaggccgtgcggctgcgactgagtcgggtaggcggtggggcagtattcgggtggagagacgacactgcggcaggcgggcagcgcagacggtcagcggggggttgacatctcccgacaggcgaatgaagaggagggacgcacatgagctcgttgcagagcgcccatcccgtcaagttgcccgctgccctgcaatcgatcgtggcagaaaggtgacaagttgtcagtactctcgcacggcaacagcaacagccggcggacgagggaggcggcacgggaacgcacagggcctcgtcctgactggcaaacatgagctcggcaaaaccggtcgaagcgacatgccgggccgggtagtgcagcgtgcttgactggacgacgcctgctcgaagatgggcgagaaatgaggttgggcggtcagcgtcggccagctctgcgttgcccctttttcgcgccaagcacgtgagaggccggccgcccgtgcgtcgaagctcgagatgccgagcgccgaaaaaatgaaacgtaccgctcgtgctgaagaggtcgaccaggccgtggtcggtcgctgcgaacgaggcgatgccaaggcaagggaggggttgaggagaccgagcgagtggtcagccgccctgttcagcccccggatcatgggccgaccggtggtttccacgcctccaacgcttgccagccttctctcgggcgagctcgccgaagggcgtcgccgagggaggcgagaggcaagaaaagctctggggcccgtctcgtgcaaccaaaggaaaggagatcgaaagggccggtcgggcgcgtagccgagcgtctcgtgctctaatcgcttcatcagcgggctcgaaccccttcccgctccgaccgcttgctcgcccggccgctacgcgataaaagatggaggctcaccatgccggctgacgttaccgacgacgaccttccaggtgccgtcctgcatggatcaagatcagagaagggcggcgtcagcagacgaaggtgggttcagggccaaagggtcggagcgagcaagggtgggcggggagaggcggcggacgactgcgggtcgtcggttcaggctggctgggatcgggccatgcctctgctatggccggacgtacctgaatcattgtctgccgctgcggcctccgaacggcctggccgaacgaggcgtgcgacatggcgttcggaggtcgggaaggagagtgaggtgggcggaggaggaggacgacatctcggggagggcgacgacgggtagagtcacgcggccgagtgctacgtcttacgcggcggttacgccgaccacgcgtgaccccggccatcatcctcctcgcattcagcctgacctcgacctcctcctgcttcttccagctcttgccctcccgcctctctcgggacacacagacctccagaatcagcaaacacatactcaaggcggccatgtccatcgccgaggccaggatggacacgggctcgggcacccagaccccgacggcgagcggcagcggcggccagggcagctggcgcggcggcggcggcgggggtgggcctggaggcaggagctcgcgccgaggcggcggaggcggccggagcgtcaacggtggacgggtgcgttctcctccctctgtgatctgctagcttgtggaggaagagggatggagggcagaagggcgaggagggctgaggcgtgcaggtcggccgggcggcgacgcctcaggaccgggacgcgccgttggtcaaggattggctccggcgagctctcgtcttgatcctgtgcggtagaagaacggcacaggaggctggcgaggatctgtcgcgtcgacgctcgggcctctgcgttggtaacgctcagtcaaagcctgctgggcggcctcctggctcgggagcaggtggcggcctgccacgcctgtagcctcctaaccaccttgtctgctcgctcgcgggctgggctggctgccggtctgcgctgggcatggtcgattgacgacgccggcagctctcgtataacgtacgggactggcggaagagcagagggcttcgaggtcgagcatgaccgcgacagcaccgacacgagctgacaaccttcccccggccaccctcctctcactctcgacgcaatcgcatcgcagggcggtcgttctaacggtaccgacgacaagcggtcgtctgaccctcgctcgcgctccgacccgataacggcctcgtccgccgtcggcgagcacggccacccgaagggcgggcctggaggcggtggaaagtcggccaagcgggcagcagggcgtgtcaacccgctcgcgggcagcaagccgcggacgaacgcggtcgaacacctgcgcgcgttcctggcgcgccgttggaaccctcaggcggcaatgctcgacctctcggtgcgtccctccgaggctggctgcgggcactcactcgctcggacgtccccaggccgagcactgaagtctttctcgaccctcacagaacatggcgaccgactcgttcctgatggagcgcgagatcttccctccgggccacaagcaggccaagccggcactcgcgcgagtcatctggaagctcgtctcggagctcaagccgcctgttcgttccgcacgtgctgttcgacgaagcgagaggcggacgacggctgacctctcttctcgcccgggtaggtcgtcaccatctcgtacgagcacaacaacctttcaaacctcgactcgctcgaggcgctcgacggctttgtcccttcggtccgcaacctctcgatcggccacaacccgctcaaggagatggcctcgctcaaggccatcacgagcctcaagacgggcctcagcaacctccgcgagctcgtcacggttgggacgcccgttcgcgagatcgagatccagaagcgcgggctcgagggctacaggacgtgcgtcgccctcctcggcagccgcagctcagggccgagatggaaagcccgaaggctgacgcgcatcatctttcccgacatcagacttctgagctcctacttcccttacctgagcatgctcgacggcgagccgatcttcggcctgacgtttgacctcgaggcagacgcgatcccggccgggccggccctgccaccggcgaccaagacggccagcaacagcgagacagtcgcctttcggccggtgccagcgttcccgacggcgaccgttcagaatgcaatcgttggcgacgagacgttcgtcaacgctttcctggcaaagtacgtcgtcgaccgcccgctccaaagctcgtcgttgtgccgactcttgacagccccgccgcttcactctgccaggttctttccgctgtttgacacggcccggtcggagctcgccgtgctctacacgccaacgtcgaccttctcgctaacgatcacgacctcgccgccgccgcgggcgcggcacttcaagctcggggaggtgacggcccagcagaagacgctctcgtggcgcgagtggaacggcctctcgcacaacctcctgcgctcgcagcggattgaggaaaagatgcagaagctgtttgttgggcccgaggcgatcggccgggcgttttcgggcggccaggagggcaagagcctgctcaagacgaggcatccgacggcgagcgccgagcgctgggcggtcgactcggtcgttctcccaacggcggccggcgcgctcatgctcgtcaatgtccacggcgagttcgaagagcgtgcgtccccctcgttcgaccttccgtctgccgcgtgagtctgctgacggctgacaactcccttgctcctcgcagtgccgtcgctcgggctccgctccttttcccggtcgttcatcatctcgcccgctccggccggctcggccgcgcttgccgcgggctggccgcttcagatcatctcggaccaactctcggtccgagcctacgccggccacgccgcctttgcacccgacgcagtccccgtcgcggaccctggtctggcgccggtagcagggctcggtgttggagctggcctgcctacacccgcggtactggtgcgtccgcgcgcccgcgtccgtcgtaagcgaatactcaaatcactaacccgtcacggatcgccctctgcagaccgatgcgcaaaagggggcgctcgtccagcagctggccgagcggtccggcctgatcgtgccgttcacgatccagtgcctcgaaggcaacggctgggacctcgaccgggcgtgggccaacttcctcgagctcaaggtgcgtcgcgttgaagcgactacattggagggttggagctaactgtgctcatcctgtcgccacgtcttgtagcctcagatccccaaggacgcctttgtccagtgagggccggctctccctgatccctttcggtcgcctgtcaccctttgcattccagggatgactcgtcggacctaatcctaccctcctcgctaaagtcatgcgcgacgacctactcgcggccggtttccgccgtcggctctcggctgaactcacgcgcgcgatcatccccccttcctccgcctggcctccccgccggcctccctccatctgctattcgtttcctgtccacacgcaaacccacatcatacacctacacccacacatcacacaatccccgctgctcctctcctgcaatgacatagacgattgtactgcctgcctggacatgcgagcggtgctctcggccgacgccacggggccggttgggcggcgatgcctccgagccgcaggcgcgctccgaacgcgaaccgcctagcgcaaggtcgtcggccgccgtcgtgcccccgactagccataccgcgcgaagcgacaccttctcccccttatacactctaccctctacctacgcgctccgtaaaggggaggccacagccacctcccgccctctccgtcgtcttccaaagctcgcttgctcctcgggatggccgccccgcctccgccagctgcgtccggcgacctgccgcagcccacgtcgacggcaccgccagcgacggctgccgcgaacccagggcagactgccagcgcgagcaccgagcctggcggtcggccaaagcgcgacgtgagcgagacgagcgacctgagctcgctcgacggcgagcagccggcgtcggcagccggcggccttctccctccttcggtcgccggcgccggcgcctcagccttagcagctgatgccgttcctccgcctagcgtcgagctcgcacaaggtccgtttttccgtcctcgagcatcccgcctcgctttctgggctgctctcgctccatcagcccttccgcttgccatctgtcggagcgtgggctgacggttctgctctctcgtcacgcctcccttcgcgaaaccgtcgctctcccatcaggcctagcatccggcacaccctctgagctctcgtcaaactcgaccgccgctggaaacgccgagtcagccaacggccggaatcccgacgtcgtcgtcaatggtccgacgccctttgcaaccctctcctcggccgcctcggattcaactgccacggccgcggcggcctctcctccgccgcccccaccgcccgcgccgaggtcgctttcgtcggcgctctcgtcgcccggctcacccgcggcgtccaactcgagcgacccgaccgccgagacggagccactcgccggctcgcctcgagacgatgaggacgacgaggacaatgcgccagcggcccaggacgacgaggacgacgagatggacggcagcgggcaagaacgcgtcgtcgtcgactcgcccgcggctcgccgacgacgacggcagcagcagcgcggcgcgaggaagccgccggtgacggccgtccgtgcgccctcggccccgccggctgtcaaggcggcagcagcagcgatgccgacgctcgccatccgggcggcgacggcgagccccaagacggcgctcgagaaggccaaggaggcgagcggcagcggcatcgccgttggtcaggccaacatctggaaagccgacgatgagggtgactcggacctgacgcctgacgaagattcggatgcggacgagccgcctgcgcccacctcccggccgaagcgcaacaccaccagcgtcgcagacgacgatgatgaggaggatgacgacgaccggatggacgtcgacccgtcatcttccaagacgctgaacggagctaaggcgacaacacctcgaccatcgacgaaggcaagcacgacgccgacggccagccgatctgcggcggcagagaccgatgaggacgacgacgagtcggagagtcagcaaatccgtccgaagcgatcggctcgcactcagcagcgggcgtcgcgcaaggtgctggactccgacgacgaagagtgcaacgagccgaacgaggccgactcggccgagtcaagcgaagacgaggacggccagcagacgcccaagaaggcgtcggcctctgccgctgctgtcggcccttcgccgtcaagcgcgctcaagtcggcccctcgaatggtcaatggcgagctcccggccgcacgggcaaaatcgccggtcgtgccgcagtcggaggagctctcgccgccgccgacatctcccggccagtcggacgccgacgaggacgacgaggacgaggacgacaatgatgaggcggcggaggacgaggccgaggctggcaagacgccgaccaaagcggccaagccggacgtccgcttcaacctgatgggggccggcgcgggagcgggcgagcccttccaggaggacgaggagatggaggacgacgaagacgacgacgaggaacagtctgccgctgccactgtaccaaacgacgacctgcccgaacttcgagttgacgaaccgcccaccgagatggtcgccgctgccgccgaagcagaagccgaggcagagtcagagaccgcgcaggccgaggccgacgaggtcgctcttcccgacacacctcagctctcgggtggcgagagtacgtgtccatcacccactttgacacgtcgatctgcgctgactgtcctttctgtgcaggctcatttccgatcgcgctcaacctccaggcgcagcagcggcttgacgcgatggaggccctctccaagattgagatcgcttttgcccgcctgcgcgacctgatgcacattgagcggatggaggagtgcgcgcgcgaggaggagaagctgctcaacggtgcgtcgccttagcctcactcgagtcgttaactcgctgacggcctctgtcgattctcttgcagacacccacccgcttcttacgcaggtccagacccgactgacggcgctccgcgaccgcgagctgtcgtcgatcgaggcccggcatgtcgtcgccaccgctgaaagcacgctcgtcgagaaggccgacgtcagcggcatctgggagtggtggcggaacggccgcgaagagctccagcgcgacatgatggccgacgtcatgcgcaagcgccgacgggtcgaccgcgagaagcgtgctgtcgaaggaggccgacgtgcgtcttgctttgtttcagttgactgcagagctcgaagattggtcactgacacccccctttccctttgtcagccacgcggcccctgccggtcgccccgcccggcccgccacggccttcgagccgcaaggagcccgcgctcgaggatctgctcccaagctcgtacctcaattaccggcccgaggagaagcgcaagatgcgcgaggagcgcgaggcctggggacctcggccgggcctgctggggctgaatgagcgcgggagggacaatgacctcgacctgctcggcatcggcccctcgactcgttaccatcagcaccaggcccagatgttcaggacgtttgacgcgcacggccagccgatgatgggcgggccgccgatgcatcacccgcaccacgtcatgcagaaccagccgccgcagccgtaccacacgctccagccgcatgcgtacgcgccccagccgccgccaccaccgcctcactcggccgacggagtctaccttcagcagcagaaccgaccgccctatgcataccggccaccaaacatgccgccttaccaggccgacagcgggcacctccagaacgggccgcatccgccgcagatggccatccacccgcatctcgccggccacccaccgcatcagggccagtcgggcccgccaccaccgccaccgcctcaccacatggccggcggtggcctccagccggcgttcggcgaggcctatggcaagccgcccggttcgtcggttgtcattggccggccgccaccaggctcgggtggtcaccacgcgaccggaagggccatcatgccgtcaaatggcgccggcccggccggacccgaggtcggccacgcctcgtacgcctctttcgacatggcctttggcggcggcggcggtggcgggaacggggcaggcaacggcgccgctccggccggaggcgcaccttacggccaagcgcccaacgggccgccaggccctgtcgacagcgccagcccgcacaagcgggcccggaccggcagccccgtcggcttccgtacgctcggcatcgtctgagggagcattgcccccctccccccctcgcgacacgatcacaagccggactgcagcacgcccccttgaaaagtcctgctccgcgcctccgcgattctgattggcttccgctctgatagaactgagcgcccggtcgcggtggctgtggccgcccccttcgacgctcagccggctcggcttctggtatcctgatctcttcatgtcgattcaatcgagtcatcgacaggcgtacctgagttggggcgagcaaggttgagtcagtcagagagactgccagatgcggagaaacaggcgctgcgcacatcttgacgtcaaacagctcttctgggaacccggtctggccgcaacgaggagccgtcagcgacccgtctcttggaagagccgcgtttctcaagcagcgagacgcacctgcagctcctcgcggataagctcgagaccagactgcttgaaggcgtacttccaggccttgtcggacctgcattgaacgaatgagtgtcagcagagctcgctcgccccgactcgggtaccccttcgtcgagagaggacgcaccgcgtcagactcgagtcctggtcgtcaaagactgagctgcccttctcgccgtcctctgcgagatccgggcagaggttctccttgacaacaaggacggcgtcgggcccgacaagggctgcctttgaggccttgaggaactctatcaagtcgggcgtcgacactggcgggcgtgcgacgagcggggagttggcagggtcaggtcggctggccgagggcggtcgacagcctccatcaaagcagacacgtacagtggccgaggcaccactggcaccagacgacgtcgtacttgagcgccttgccgtcggccccgtcgacgccctcccaagcgccgacccgcgcctgctcctcagccgtcttccacgggtcggccgggtcaaacttagcgagcccgccgcgccagaagcgagcggccttgggcgccatctcaccctttgggtcgtcgaccggctcgccgccgaggcccttccacgacgacgcggccgcgacggcctggtcgaggaagtggggcgcgggctcgaggacctcaaccgtgtcgagcaagtggatgagaacgttggccgtcacgcggccgatgccggcgccgacgtcaagcgcccgcgtccgtgggatgggaccgtccggcttggcgagcggccggatcgacgagtcgactttggacagccgggggacgagcgagagcaggaactggcgcgaggtgagcgagtcgacgcgcgagacgtggccgaagccgccgaggacgccgtcaaccgaggcggggatggacgcctgcaggcggacgagcatcgcagtcagccggccgtcactctgctgcgccacaaaaggatggtggggaggacgcacccagtagtcgaggcctgtcggagcgagcagatgcgcgggcaagcagagggtcagcttgctatgccgcgccgcctacgggtgaggcctgccgactcgctgctcgaacgcaccctcctcgtagttgggtttgggttcgagccgaggcttcttgagcttgccgggcatgctgagcagggtcgagtttgcgaggcggaggctggtcgacgttcgcatagcagaggtcggacgagccggccggccgagctcgtcgcctggctcgcgcggccggcgacgagcgaaacgaaggacggccggccagcgtcgagagagcggtcaggatgaggacaatctgtcctcctcaaagactagcaggttgttgcagagttgaccgtggtaagtaggctgctctagtagagcggatcatgccagtctggtgctgacaaagggccgttggagggtctacagaggctgtgctggaggtcgacctggcggagaaagaaaggggcctcctgactcgcctcgtctcctctctgctgtcgcctgcccactccatctcgacttcagaccaccacctctctttgctcgtcattcacaacgcccgagacgatgctcatcagcacggccgccatgtcctccccggccctgtccgaggatgtttggatcgacatcctcggccggctcggttacttctcgctcaagcgctgccagcggctcaaccgtagcttccacgctctcctccgccagccgccgctcgccggccgcatcttacatggcaagctgcccgatatcacccggtctttgccgccatcaaggaatggtcaagccgtccggtgatcccgacctggcgctgggacgagagcacttacaagccggccaaggacaagtccaccaaggacttcgacgtccaggacgacttcgcttcttagccgccgctcacccgcgctaccatcgacttggagtacatggaactacgtgacatcccgcttcagaacgacgccggcatcaccatcaaagacgtctgcaaaggctagatgagcgtcctcgacagtgccatcccgcagagagtccagcgagcatttcgcgaggccacgccggaagtttaccatttcaacttcctgggcgatgtcttggctaggcggtctatgcctaagctcccgcgccaggtgcgcgactggcagttgagggagacgacgtagacgagtcgatgaatcctaataactgtaaatcattatccagacttgtccggaatctacctgcctagccagatcgcgcgcttgtcagctcccggcagaggtcagtcgccaacatgatcttcaggtcgcccgcggaagaaaagccgctcatggacgtcctactcatcacagcaggaaattctttcgcttcagacgaaggggaggcggtgagaggtgaggggcaaggctcaagcgggcggatgatcatgccattctcctctttgacgatagcttgtatgggcgccgttgcccctgcaagggcgagcgagcactttcaaacctcctggcgtgtcgttcgtccgatctggagtcgtctggcatcgtgacgggtcgtagtgcgggccgactcgcaggcggtcgacgtcactccgcctgctgcgcagcacgcaccgaccttgtcgcacaatttcgcgctcgaccacatctcctcctccttctcgaccaccagcactcgccttccagccatgtaccacctcgccagcaacatcctccgtcagcgctcggccgctctgcgcggtacgatcggcagtgtccggcccaagggcgtgcttgcctcgctcaaagactcggtcgagacggtccgtccatctgcgctagccacctgcccaatctcgctcgaccgagcgaccgccgatgcggctgctgagacgcctgtttccctctgcagatcaacaagaagacgggcgaggccctcgccggcgggatcgagcacgcgcaagacgccgcccggcgcctgacgggccgcgcaaaggtgcatcgtctcggtcgtcctctcctttgtcgcgtccatgatcggccggctcgcgagcgagcgagaccttgctgacgctatgcgcgccctcttctggcgctaggcgtccgacccggcaaaggctgccaaaggggtggccgaccgagcggccgacgccgtcaagccgactggcgccgctggcggtcagcgcggttcgaacgagtccggcgtcggcagcggcacggccggacgcaaggcctcgtgaagggcggaaagcgaggaagcggatctcaggcccgaaggatcgatcgttgcgcggagtctggagaaggaggggttgtgaatggctttgattgtcgagtcagcgcctcgtccgaccgtccgttagcgagttagccgtcgatccgaccctctccagttggctccagcccctcgaggtcgatacatcaatcgcgccatctaatagcagccaggaagtgaagcgcattgcgtccagaccaaagcgaccgaaaagagaaggggggaggagcagagaggtgctctcgagtcgacctcgggtgcccgaggcgcgcgttttgaatgggggtggttcgtttctgttcgtttcgcgttggccgtctactgaccctcgcgcttgcggggtgcgctccggagaatgttgtccaccctgcaaggcgggcgcgaggtgaaagtgggtcaggacttgaagcttccctcacgagacgggcaaacggaagacgcaccgcaggatcatttcggccgcctcgctcgcactgctaacaacctgccgcttcagcttgtacgactcggtgatgccgagcttgcgcatcgagccaatctcgccgaggttcatgtctgcgggcgaaatggggcgaaatggggtcagcgtcaacctcggaggtcaggaggggaggtcggggccacggaccgagtccggcgtcactccggccctcgtagtgagcggcccggagcttcgagacgaggtcggctgagtcgtagccggcgttgtccgagaggatcgtcggcagctggcggagcgccttgctaaagccctcgacggcgatcgccttcttgccgctcgtcttgcgcgcagcctcctcggccgcgttcgacatgagcatctcgctgcagccgccgccgaggacgacgcggcgctcctttgtcgtctgcgagaggaccgaaagcgcgtcgtggagcgagcgctcggcctcgtcaatcatctgcgaggtcgcgccgcggaggacgacggtgcaggccgcgccggcggcgacgcccgaaaacttgatgagccggtcctcgccaatgatgacctcctcaatcaggtcgcagtggccgagcttgatgccgccgagctggtcaaacgacgacgcaatctcgccgcccgtgacgagcgcaagccgctcgacgccctcaaagtcggcgtgctcaatcaccatgatgcccttctcggccaggagcgactccgggtagttgtagatgagctgccggttgacgaagcacgtgatgccgtgcgaggcaatcaggtcgaccttctcccgcatcttctcctgcgagacgggcggacgaggattggcgtcaatcccaggcggccttccagtgcaacctcatgcgcgctcgacggaccttctcggcccgctcgagctcggccagcttgcccgtgccgtcaaccttgacgcgcgcgccaaagatcttgatcttgtcggtgtccattgctagaggtcgcgcgacatgtcagccctcccggtcgcgcaggttatacggcgcacgaaggaggacccacaggtgttgccgatcatgatctttgcgttttcgatccgctttggcgagttgacagcgattgacttttcgaggatgaagccctcgtcgaggtacgagtcggtcagctttccgccgaccttcttgatgatctgaatgtggtcgaggtcggtcgagccctgggcgagtcgggccgagagagaggccccaggaatcagcgatcgggagaggcactcaaggtctcgttcgggcccagctccgcgcgcaagagcgacagggccctgctcgcccaaaaggagcgcaccttgagccggaggacggcgtcgacggcgaggttggcaaagtagtccttgttctccgagagaacctttgacgagagcgttgtccgcgcaatgttgacgaggtcggtccggaacgcggcggggtcggcgctgagggacggaagcgagcatctcggtcagcatcctcgaccagagcgagcacccttcctaggccgacggaagaagaacggaggggaacagacgagtggtcctgcgcggccccctcgagcgcgtcgagcgcggccttgcttgcgatccggtagccctcgatgatcgtctgcgggtggatcttcatattgacgagcctttcgccctcgcgcaggagctcgctcgcgagcacacagaccgacgtcgtcccgtcgccgacctcgtcgtcctggaccttcgagatgttgacgaggatcttagcggccgggttgtcgagcgagatcgacttgaggatcgtcgcgccgtcgttggtgacgatgatctcgccggtcgacgcagactctgcgcaggcgagcgggagtaaagagtcagcttgaggacctaccggaccgacgagagcgtcctctggctacgcacgaaggatcttgttcatgccctgacgagtgggagcggacaagcgcaaggaagagagtctattgtcagccgcgagctccgtcgaaagacgcgcacgcgcacgacgagctcaaaggggagctcgccggcgttcgtccctcacgtatggagagccaccgccctggcggccggccgacagaaggtcagagcagcgacgcaccttgggtccgagcgtgctctttacgaggtcgccgagggccatcgcgccgacgaacgagctcaggcgggcgctctcgccgcgctcctctccggcctgcgccgcgaaatcgagggaggggaaggtcagctcgagccagtcgagccagcggacgggtatgaccgacgaggccgggctcgcccaggcagaatgggaggacgtacgtcgtctgcgaatacgttcatgtcgtcaagaggatggatcaggggtggtgttggaggcgtcgtccgggtcaaagggcctcgcgctcgacgcgcacaagttagatgattcgtttggaatcatcaattgacagcgacgacgacgacgacgacgacgacggaccgacagcaacgacgacgacgacccttacagtacacctgccagcacacctgccagcacaacacctgccaccgatggcccgcccgtctgtctcgtccctactccggctcgcccgcgccgggccgtcgtcgctcggctcgacctcggctgccgtctcgtcgcgccggtcggcctcgtcccggccgctgcctaagctgccgtacgagccgctgaggccactgtcggccgagcacccgccaccggtaaaagctggctttgtccacccgctcgcaaagtgggactcgttcctggatatccgtgcgtcccggtccaaggcgatgagcaccctcgggggcgcatccggcgctgtcgctgcctgttgctgcctgctgcgagagctcgcgcacgcgtcctgaccgaccgatcgacccaacccccgctcttgcccgtctcgcagcgcacgacccgagtctccagccgggccaggtcgtcgccaacaacccgccgatcatccctcagcgctacccggacgagggctcggccgccgacgacaaggccgtccagaaggcggtcctccagaagattgtcggcgtcgacgcaaacacgatgggcaggctccatcggcacacgctcgtgcacaagcgcgtcgtccacatgacgcgcggtggtagggtgtcagttcaatgctcgccttcttgttaagagaacgcgcgctgacgtgctcgcgaacctcgacggcgtagagcatcacactacgtcttaacgatcgtcggctcgcccgagaagggcctcctcggcatcggccagggcaagtcaccgacgatggccaaggcggccgaccaggctctctcgaatggtccgttcctaaccgcgctccagagtcgcgtccgagctcttccccgctgctacctcggagctgaccacgctcgatcgtcgccatccgccgccttgaagcgatgaagaacatggacaaggtctgccgcttccagaaccggaccgtctggggcgatggccgcgacatgtacattaagtttggcggcgtcaagctccaaatgcgcgcgcgggcacccggtgcgtccgcgctccccccccctctcgatcgctgactctcttacgccccgccccctgatgcacgtcctgacccaccttccctctttgtgcggctgtcgaaaggctttggcttgcgctgctcgcccacgctccacaagatgttcacctcgtgcggcatctcggacgtctcggccaagctgtatggctcgcacaatgtcatgcaggtcgtcaaggcggcctcgctcctcctccagggtggcgtgcgtctccttctcggcccctgcctactcgtccctttgctcgatccgcttcgctgaccatctccccacctcattgcctcctctcgcggttgacagggcaagctccccggcttcggcgacggtctcggcggcaaaggccgcgagatggagaagggccgcggcatgcgcgatatgcgtgagattgagctcgagcgcgggaggtatggcgtcgagcgggcgctctatcagtgatcatagagtctacggatgacttcaccagcgattatagagtctacaaacgcatcgggcatcagaatggttgagggagggcaccagacaaccgggctgaaggggtcaccaaatgggcagaagggggagaaggggcatcagacggtccgagggggcctttggactgtcagaaggagggcatcagtcgatggaggtcagatgacgacttgtgctcgagcgccgggcgttggtcggttgggcgagagagcgccgaggcatgaccgtgaccgcgggcagagatgagtgaataaaggtagtcattggaacgccccttgcgtcgtgtctgcagctagtgggaagatctgtcccgagtggcgggtgcgtcggaccggatggcttcggtcgggtgtgctgctgcgcgtcgtcggctctttggcgagacggtcggtcgccttccctgtcgatacctccaactacgaccacccggacggccgcatgctcaagtttggccagcaatccactccagcaggccgtcggcgctcatctgctgccggcgccgtcgcagacggcctgccgccctcgccgacccggacggcgctcgccctctcggccctgacgcagctcttccctgacgcctcgcctgccttcctgacgtgggcgatccagcaccatctccggccagcctcggggcctggcaccggtggcgccgggcggtcgccgatggggatccaagagctcgtcgaccgggttggggagaaggtgcttgacgggcttggcgagctctacccgaggcgacggccggaggagggcctgtccgaggaaggtcgctcccacaacgaccggcggctggcggagagcacacgggtcgccgggctcaacgacgacctgtcagtagctagcagggcaaattggcacaccaacgagcttgaaagaccggcctgactgacgaacgatccaacccccttccctcttccgctgacccctttcctcccggtgtcgccacgctcgcagcctggctctcgctcagctctacccgtcccatccggtccccttcctccgctcgctcatcgctcacccgcagcatgaagccgcgccgctccacttcgcctcggccgccctgctcggcccgctcccgtccggcctcaaccagccgacgccaacgctcgcgcctcacccagtgagacggacatcaatcgacccggccgaccggctccgaacgaccggctacaaggtcgccgtcctcgcctggcacgaagctcactacccctcggtccggacgagctcgctccgtgcgctcggcgccgaaaacaactgggacttcgcaaagacgcgggcggcggttgacgtgctcgtcgagacaaggggtttcgccgctcggctctggggcgggatcgccagctcatttgcgcgctttggctcgagcgtggcggcgtcgtcctcgacgacgacgacgacgatgagcaagaagggcaaaggcgggctgcctggaggaggtcggccgctagcgccctgggaggccgacgacgaccttgtccgcgagctgcccgacccagctcgcgacgcccgcaggcgacttgaggcggccgacggcgccgtcgccaagcggatcaatctcgagcagtatgtcgcgctcggggaggagcttgcgtgttcgtgctgctttggcgacgacgcgtgggaggagatgggcgcgtgtgctgaagggcatctcgtctgccggtacgtactactggttgcgctggctacccgaaatcgccactgactttgatacggcgctcaaacattgcagcgactgcattaatacgcacgtctcggtcctcgcgccttcccttacctttccagagggtcccgccgccagcgacctgcccggcccatcgactctcatcccctgcccgtcgtgtccatcgccgccagccaaggcttgcaaggccgcgatcgagctccctacgctccggcggtatctctcatcggccaactggacaaattacgagagagcgctcgacgaggccctctcgcgcgcactccgtacgaagcggcgggcaggccactcgggcagcgcgtcgccggaagaggtgctcgcctgccccttctgtcctgacacgaagatccgtgccgtcggcatcccgctcgttcagcccttctgctggggtccgccgccggcctggtcgatcgcgacactcccgctcgccgtcatcgcctttgctttcttcgtccttgccaccttccatgcaacgtcgctcccgctctttctcccgccggcgaccctcgccgacgacgacgccgccgccgaggaagcctctgtctttggccctcgcaagacgctccgccagacggccgcctacgtccgcgacctcgtccggcgctcggcgcacaagctcaacggcgcgactctacactgccacaacccggcatgcggccgggcgagctgcatctcgtgcagccgcgaggtctgggacggcgagggcccgtgctcgtgcctggcctcgtcgccgccgccggtcgttgcggaagtctcagcaagcaacgatgcgaaaggatcggccgaggccaaggagaaggaagaactccggctcgtcgtcgagcgcgcgatgaccgaggctgccgtgcggacggtccgtacccgctccgcgctcagtccccaaactatccttccactgacaagctgaacactctttgcgactgacagtgcccgtcctgcgagctcggctttatgaaaagcgactcatgcaacaagatgacgtgccctcgcgacggctacaagatgtgtgagtgcttgtcgttggtcgtcgcgacaactttctctgacttgacgcgtgccgatggaaggctacgtctgccgcgccgacgtctcggttgacggctacgcccacttctgcccccattttcgactcgtccgtcagtcaccagcccctcataccctgacccgcgcacccgcttcgtcgcatcggctaactcaactctccgcgtctgcctacttgcttgcccctgcagccggcccgtgcaccgagtgcaacctctgcgacctctatctcttgccagacgaggacacggtcatccgccaggcgggcgacaaggcgcgccaagcgtggatcaagcgcaagcgagccgcaaacctgaacggcggcggcgagcgcggctgggtcagcggcttgcgggtcggcccgccagacgagcgcggcaggcgttcgtcatcctttcctctcgaagctccctttgcgctgaggctgacgacccatctcgtatgagggttttctcagggacgcgcgatctctttcatcgcgtcgatgtgcttgccagcaacgaggtcgagcgtctactgtgccttctgggcccagcgacttccagcctcgacctcctgctcgtccggccgccgcaattcctccagctgcttgggcgaaacgcgtcgtccgtcctgggcatcctcatcctcgccatgtggtcggccgtcggcaccatcggcgttgtccttgccggcggtctggcttgaattatcgcctgttaacctgacgacccacccaagcttgcttcacgaccgactcttcgaccttaacgactgcgatgactggatctaacaacattgatgaggagccaggccaagtggtattgtggctacaggtaggatgagaagacaggatgcggaagggcgagcaagcgaccgggagcatcgcccgcgcgaggagaatgagtgtcgtgcaggatagaccgagtccagcagggataagagtccggggggccatggcaagcggccgggtcaattcggcagctgagcgtacagcggcaggcaccgcgtcatggccagcgcgtagtcggcggccgggacgacgggcagcatcggtgccagatggagaaaggctggcggcgcaggtgcttcgaccggcgaggccgaagcaggaggtgctccgtagaagccgtcaagcaggccgacagagggtgcagaattgaacggtccagcgccgacgatttccggctctggtcgctggattttgcgaaagttgaccgggaacggcgcctgggcagaggcttttggagcagcagcaggcgaagccttcggtgagggccaactgacttctgcgcgatttgcaggggcggggacgcggacgggcggcaagacggcagcgagcttcgactggcgttgtttgagctgcgagaaggcgtggaggttagctgaggccgcccccggcatcatgtcacggcagctggaaggcgcactttgaggtcgaacagttgcccgaggttcatcgaggcggtgccatcgaccttgctcctactggccaaagtgcttggactctgaggcatgggtggcggctgactgaggtgctgcgagctctccgagctggctgaggaggccccttggatgcgcacgctggcgatcgtgatcgaatccttgggctgtaaggcaagcatggcacgcgtatcagcgagaaaagcttcgccgtcgcgcaagaaagacaagcacccaccgtcgtctcctgcatgctctcgtccccgtcagactcgtcgtagtcgggcgcgagcttcgggaccttcatgtcgcgcaggtaggcgagcgccgcctggttctgggattctgccacgccgagacaagacgggtcagggacgccaatcttcagcagagagctccgagatactcactatccggtgcaaagagctgctggaaaacagagacgtctggcagcagcttgggcagaaactcctcgacgtgctcgagcgagctcgttggctcgactgagtgctccatctcggcgtccgacgccagctgttcgcgctccttacctttgcggctctcgacatggcgggctgaagccctcgtgcctgaccgaaggggagcgtgctgccgcaggccgctacggcgcggcgcgaccggacgggaggccggaatctcctcgccgtcgtcgtcaaagtcggtcaagtcactgtccgagattgacgacaaatccgacgaggacgtcgagccggactgcttccagcgcacggcctgtcgtttattcggccgagtgtgagtgaccttggctgagcccgaggcgacggtgccggcagggcggcgcggaacgacaggcacgcccgcgttcgcagatgttgccgccgccggcacagctgcgacgagcgccatatccgggacgagattctgtcgagaagaggaaagtcttcagcgcctgagttcgagcgacagactgcctctcgccggttgttgcacggacctcgtcgagaagaagcgcaaagagctcctgctggccgagctcggcgacgaggcccttgatgcctccaaacgggccccaagtgcctttgagccgggctggtcctccatggacgacccagcaatgggcgagcggcaaagagcgatagtggccgagaaactcttcccggcgttgccgatggacgccgagaacattgaggaattgcgtctgtgcgggcggcatgctcagcgcgtgtacgcgaagatccaagagcttcaaggcaagaggacatacgagattgattgagtggtccgtctgcttgcggacgacgctgatcgggccgacttggacctcccagacagggatctgacgggggcggaagcgcagcgccgacagtaaggcgggtcagctctgttgtcagtcctcatccaccctgaagacccagccggcgattcatcagaggcaggacccaccccactgtagacgacagtccgaacgagcgcgtccatcagagacacagaagccgagggaccggctcgcaaacagaggcaggtgcgaggtcttgtgtcgatgctgcgacagagctgcggagggcgccagcgtcggtccgtcagtctcaagcctggccgagaagcgggcggctcagtggttttgacccgatctgaccttctggcttgttccgagcgtcggacgtgacgagtcgacgaggtctgtgcgggacgggaagagaggcgaggaggctggtcgagcgcagggaggcccgagctctggtcgacccgccgagccgaagccgcccgggcttaattgagtttgattccaatcggggcccgtttggactctcccctttgcgcagctcgacagtcgcccggtcgttgctcagcgtgagtccaaggtggcccgtacgagcagaggtacgatgagactgcatgagatcctagatttcctaaagagccgcgaggaccccgaaccgacttttcggtcgacggccggcccttttctatctcgcctaggcaaggtacttggtccagacggccgcctcgacgacggcggccggggcgcgaacgccggtccacttctcaaagctgtaaaagccctggacgaggagcgccgacaggcccgggacggccgaccagccggccgtcatctgcgcgagctcgagcagcggcgtcgggaagggcttgtaggccatgtcgaggacgacaccgccgccggcagcggcgaggagctcggccggaaggtggatgagcgtcgaggcctcggcggcgtcgacggtggtcgcctggccggggatggtgccgacaatgacggtcggcgccggtccggggaagctcgcgagcgagtcgacgacgacaatattgaagtcggccgggaaggcggcgacgatggcgtcggccgaggcccgggtccggttgaagaggtagatcgttgcgaggctcagcgcgtggagcgcatagacggcggcgcggcaggtgccgcctgcgccgatgacgagaccggtcgactcggccgtcagactcgcgccagccggcagctttgtccggcagaggtcacggatcgcgagccagtcggtgttgtcaccgtggagcgtgcgcgagccatcgccccccgtcacggggatgatcgtgttgacggcaccgacagcccgggcgtcgtccgagacgctgtcgagcagcggcaggacatcaagcttgagcgggattgtcacgttggcgccgccaaagtcgggcgaggcgaggacagcgcgcaggccgtcgttgaccgcatcggtctcgtggatcgcgtacgtatgcggcaggccgagcgcctgaaacgccgtgttgtgcagcgtcggcgagagtgagtgggagatcggcgcaccaaagaggtagaatcggcgggccgggatctcgcccagcagatgccgtgcctgctgaagctcggcgaacgagagctggcccggcgcggcccggacggggagggccgggtgcgtgaccgggctgaggaccgtgttgaggacgcgcgagagctggccgacggcacccatgttgatcgcgaggagtgggacgtcgctcgcggccgccgcacgggcgacaaagttgcggagggcaaagttgtcggccatcgtgttggccttaccgacgagcttggcaacgtcaccgtagcggacagcgagagcaagcttctcgcgcgcctcggcgccgtcccaggccatgctgcccgaccaattgtgccaagacgcaatgacgtgcgagtggctcttgcggccgacgaacgtcgtgaggcggtcctcggggaaaccaacctcaaggtcgatgtactcgcagccgagctggacggcgaggtcgagaagggcaaagtaggcgtcggccaggccgtcggggaacatgccgccctggctgtgagtccggaccgagaagacgattggcaggcccgtccgctgacggagggcggccagctggagggcgacgtattcggccgccggcacctggggcgccgtcaccggcttgccgtcctcagagagcaggtcgacccgaagctcgatcgcatcgacaccggcggtgatgtcgtcgatgagcggcagcgccggcgtcaactcagggaacgtcagcgagaggaacgttgaccgccttggcggaagcagcgatgccggccggttgaggtcgctgccagtgacgaagcggaagaagcggccaacctcggaccggtcggtctgggcgccgacggtcgggtacgaggtcggagccgacgtcggccggtgggcgagagcggtgtgattgaagaactggtacgaggccgtctcgcgataccagggcgcacggcgcgtgaagacatccatgttcgactctccgtacggcggccgaccggcgacgtcgaggaaggccatgatctccttggtcggccggacgacgtagacgacgggtccttgggtctggccgtactgcttcaggagctcgcgggcttcgggcgtctcgacgaccccgccgccgaggctgatgacatggccctgggcgtgcttctccatcaggattttgaggatccgcgtctcctcggaacggaaggccggccagcccttctcggcgacaaagtcaccaagcggctggccgacctgctcggtcatgtagacgtcggcgtcaatcaggtcgcggccgagtgcgcgggcggccacttcgccgacccacgtcttgccggcgccgcgcatgccgatgaggaagacgctggcgttggggtcgtgtgcagtcgcgctgacgcctgccgccgccgcagaggtcgacggtgccgtctggctgtggtcgacaccggtgaccttgatgccaatctgagggaagaaagttgttttatttcaagagggcgtcagttcgcgaacgctcgttttcggccggctgttctgctcttcggacacaccttgttctcgaggtcgtcccaccagttcggccacgtcttctcgacgcagcggcgctcctcaatgatagtctcggggcaggcgacggcgaggcacgagaaggccatggcgacgcggtgatcgtcatagcagtggaccgagacgccccgcttgagagcgtcgatcgtcgtcccatagacgatgatgccgtcgtcaaactcgtcggtctcgacgccaaacttctctgcagaagtgcgaaaagcagaagcaaagtgagtgaggggtcggtgctgacgcgaggaacgtctttcaaggagagggccgcactgagctggtcgcgcatgcccttgatgcggttgcactccttgacacgctggttggcgatgccgtagatgcgcgtgacgttggcctgcgggtccttctccgtcgccggacccgaagcgaccgcggcgaggaccgaggccgtcaggaaggcgtcggtcatcgtctccatgtcgacctcgccgagcgcgcggagcgagccaacggcagggccagtgacggtcgtcgcgtgctctgtctggacgacggtgcagcccatcggctcgagaatgttcttggcaaagccggcgtcgccctggagcgaggccgtgccaatgttctcgaccgtgcaagtcgtgccggtcagagcggcaatggcgagcgggtacgtcgcgctcgacgcgtcagactcgaccgcgtagttggccgggttgacgtaggtgccctgagggattcggtagacgtcggtcggccgaccgtcagatccgacgtcgcgagtcgcgacgatgccgaaggtcgccatcatcgcgagcgtcatgtcgatgtagggctgcgagatgacggcgccgccggtgagctcgagcacgaccggctcggctgcgtaaggcgcgcagaggaggatcgacgagacgtattgcgacgagatggatgctgcgagctggatgcgaccgcctttgaagccatttgagccgatggcaagcggcaggcatccctcgccctcgacgtagtcaatcgaggtgccgttggcccggagggcggtgacgagcggtgcgatcggccggaccttcatgtacgagttgccggtcaggacggtcgtcgacggcgcagcgccatcctcggcccggacgagcgcgcagaccgaagtcaggaagcgagcggccgtgccggcgttgccgatgtaaagctccttgccggccggcggcgcacgcaggtgaccagcgccgccctcgacaacgagcgtctcgcctccgtcctcccacgaaaacttggcgccgtcaagatcgaggagcgaggccatcatgacggccgtgtcgtccgagtgaagtaggttgcgcagccggcaggtgcccttggcgagcgcggcgaggacgagcgcgcggttcgagatcgacttggatccgggcgtagagagcgtgatcgggctgtgggccggcgaaccggcctcgacgcgtaccatgtccgacagcgtcttgcggatgacggcgtcggcgacggccgtcgccttgggctcgtgagtcgcgccgatccgactgagcaggacaaccttcttctccggcccagagttcttcttgtcgattcgcatgacgtcgagcagacgctcgacagtcaaacccttggcctcgggcagcgtcgcgatccgcggatccgtaatactaatcggcaggccgtacgccttgagcgcccgcttcagtcggccgacggcgacctggctgagaacgccgagctggcgcgcgacctcggcctcgaggacgatgccgacggcaacacactcgccgtggaggatcttgggtgtgacgacagcctcgatcgcgtggccaatcgtgtggccaaagttgacgaggttgcgcagaccagtctcgcgctcgtcaatcgtgacaatgtgcgccttgacgtggatcgagccagagacgaccgagagcaggagatcctgagccgccgtccgggtcgccagggtctggccgccgagcgtcgccctggtcgagccagacgagacggccgagatgatctcgggcgcacgcgactcgagcttcgcaaagtcggtctcgtcccagatagcggccgtctgcgagggttgaacggtgggcgtcagaaagggtggacaacttgcgagcgtcttgggttaggtggcctgaggcacgcaccttgacaacctcggccatgccgttggcaaactcgcgcgacggcaggctctcaaggcaggcgaggtcgacaaagatgaagctcggctgccaaaaggcgccgacgaggttcttgccgtgcggagtgtcgacggccgtcttgccgccgacggccgagtcgaccatcgcgagcagcgtcgtcgggatctggcagaacttgacaccgcgcatgctggcaggagggcgagcaggagggttcaagcggggataatcgatgacagggtcagtcgaaagctcttagcccggagcatgccctgcagctctcagacaccgcaagcttacgcacaaggtcgcagcgacaaagccggtcaggtcgccgataacgccgccaccgagggcgaggatgacggtgtcgcgcgtgcagcgcgcgtcgagcagccagtcctcaagctcggccttgacggcccggctcttggcctcctctcccggggcaacctcgtacgtgatgacacgcgaggcgagtttgcgctcgctgatggctctctcgaaggcggcctggagcgagggcaggaagagcggcccgacattggtgtcggtgacgaccgcgtacgtcgacgaaggcaggctcgagaggaccgtgtcgacgatgtgtgcctcgagatgaaagccgcagtggatcgagtcctggccgagaatgctgcgggtagaatggaagcgccttcagtacgccttctggaatatcctggaggcgtcgaagagcagggaccgacgagactttaaagatgtcggcagcggccgcggcagacggcggcgagctcatggtcctgagcaaggcggcggccaaggtcagcgacaagccgatgcgacagagcagagtgaggcaaggacgaacgacgcgaggctggagcgttgagctgctgactgcttagaagcggtagggtaattgttgacggtgagaagaggacggcggagtcaaggagctccgaggcgtgcttggccgcgccatgcgttttgacaagacgtttgatgcaagactggagagcccgcccggacgacctgcgccgctcgccgacctcctcccggccaacctcgaccaccagaagccctccggccaatcacccacttcattgtctaccatcccctgtacacacgcttcctcactcaatctcgtcttctctctctcatccgcaaccatccatcacattcacctttttagtccaaacaaaagtcgaatcccgacccagcatgttcagctcgccgacctccgccttcgccgccgccgaccggccaacgccgccgtcgtcgctccttaagacgaagcgcaaaagctcgtatgtcgacgacgccgccggtggccggtcgagctcagccggctctgctagcccggcccgcaaggtccgtcatctcatcgtccgggctgcagggcgctcgacgcgccggctccgcgccgcgccgcgtcgcgccgggcagcccctcacgcgaccaaaccatcaggccgcctcagacactgacctgtctttgcctcctccatccgacatccttgaccttctttagcacccgcgtctgccagcgctcaacttgcctcagcgagcgttgttcgcctcgtcctcgcagacggtcgggccttcatgcgcctttggcggagacttcggctcgccgacttccggccaggcggcgagcagcagcagcagcagcgggatggacatcgacgagtctggctcgtcttcggaggagggcgagctccagacgcctgtctacccgcacaacctcgcctggccgtttggcacgcccgccgtccccgtcggaagcggcatggccgtcgacaagcagccgtcctcggtcggcctcctcggaccgtccgactctggcgctggtgtccatgggtgcgtcgattatcttgtggtatcaagatccagctgcagatggtctgacgctgagagtacccttccgcagcccgaactgccgctcgattccaaaggtcgtgttgtcgcacccgaacccagccggcgagtcgaccctctggtccgtctgccacgactgtggcgcgacgtcggcctgctaaagcgtgcagcaatcacacgtctcgacggtcgtccggcctggcttctcctctctacaaccttgctttgacttgctttcttcctgctttctgtccttcgcgccggacgccttggtctcctcatatgctctcacctcgacaaccacccgtgtacttcgcctcccacttccgtcctcgcttctcccttggccgagcgccttggaccctctcacggcgacttccgctcagagcgatcccgccagcctctgacagtcgccaccctagtcctttcctcgattctcctcgtccgcaccccatgttgtacaaccctctcctaagccttttgttccctcctgatgcacgagcttaactcgtccgaaagtccctcccgaatttgcctattccacccgcttcctgcctgcacaatgcgatgcaacgggcgacgaagcatctcatgaacaggtccacccgacgcggccgacccagcgcttgacgccgctctcgctgcgccaaacctcttccgtccatcctgcgccgtctgggcttgcgcggacagcatcctcgaaagctggcacgccgccgccttcgaggccaaaatagaggacctttgcggcgacgagcgcagtcgtcgagcgcccggcatcggcaccggctgatgacggggtcgggtgtgaggcctgccgaaggagatcgaccagcgccggaagattggcgatctggtagacagtctcgctcgtcaggacaatgtccatcttggcctcgtcctggccgcctcgaagggcgaacgagtcccagccgccggcaaagaagcgcaggtcgatgttgcgtcttgagaggagttcgcggaagcgggcaagccgggtctgggtaagcgtgagcgaatcactgtcgtcgtcttcatcgtcgtcttcctcatcggccgcggctccgtcgacagatgatggggcgggagaggtggatcgcctggcgttaggatccgcagcggatgatggctgagcgacctttgctgacggagctgacggcgctgttggtggggcgagcaggtgacggaaagcgaggacgacgttgggcagcgtcacctgagcgatacgcagagatgtccggtcagtggtcgactcgagcgatccaggacctggccgaacgtacgagcttcaggacgagctcattgtagtcaaggaagtagaaggcggtccgcggtggtgggctcgcgaccgtctcgtcctccggtttggccagcaactcttgcagcaagtagatgctcgggatcgccgtgccgcagccgacctgtacacacaagaacgaaggtcagatgcagcggtaaagaatgctcccatcacaagggcgtacctccatgatgcgcttgccctcgacagccttccagccagtgccgttgacgacctctgcctggaggacgccgacgaggtcacccgcgcactcccatgtcttcatcccgccctcgtagacgcccttgacaaggtccgtctcgggtccccaggtggccggggtagggccagccgatccgacctctccggccgcgtcgctcgtctctgccggctccttaggtccatcagcaaccacctcgggctccgcctcctcctcagaggccgaggcgatgagctgaaagtgtgcgtcaaacatgtcgcgccggacgatgggcgccaccgagcttggtacgtgcgccggcaagggaagcgggcagtacgacagtgacggcgggagcgtcgcgaactgagcgcgagaggaaggaggaggcagccggtcagcttcgagctcactggtcaaccgtcagccgggagaagccgtacgaggtcatcgaaagccacctcacggaagggctgggacggcacggccgcctgctcctttgcgttgccggtcaagataggtgtcggctcgacagcgccaagtgtctcgtcgtcgtcctgggtgcggtgaggcgcaggaggtcggtcagtcgactttaggatacagacatccagctccgagcggccctcacgtcgaggtccagatcaaagctgaatttgaacatgctacgagggggttgaggcaggagacagagaggggatgcgaggctgagcgagagctgcgggtcgacaggcgcggcggcggggcaagggcgcacgcgctcgtgcggccgggtctgctgcgcggccagaaatttcagccccggccgcagcgactccgcgcacgaagaagggtcccgccgacagccttgcgacagtacgactcgagcacctcgacaccttaacaaccacgccacccgcttccacatactcgtcagacatgcctgccgaccgctccgcgaagccctcgaagaccaaggctgccggtcctaccgcgacgtcggacgccaagccgtcgacctcggccgccgccgcgtcgtcgtcgtcgtccaagaaggacaccaagaagccctggtcgaagcgagtccaggaggcgccccagccgctgcccaagtcgctcctctcgcagaagcgcaagtcggacgaagctggagctggcgagagcgcggccgagcaggcggcgccgctcctgaccggcctcgacccgtcggcgtaccactcgtcgagctccgagggtgaggactcgtccgacgacgatgacggcatgagcgactcgggcgccatcgatgccggcatcgaggtcaccaagctaccgacgattgccaaggacgatgctaccgtcaagcgcaagctcgagaaggccaagaagagcaaggttcgtccagccgacgtcgtcctcgactgtgcttctgcgctggcattgactgctcctcactcccctctcgctcaggacaagacgcccggcacgctttacctcggtcggattccccacggtttctatgagaagcagctgaaggcctacttcgagcagttcggtgacgtcgagaaggtccgcctggcacgcaacaagaaggtccgtcccgacctgtacccttatgacccacggggccgccgcaaggccgcccagtcttgaccaaagtgctgacgtcttgagcttctctgcgtccgttgttgacagacgggcaagtcgaagcactacggcttcatccagatggcgcagagctcggtcgccgagattgtcgccgagacgatggataactacctcctgctcggccacattctccgctgcaaggtcctccctgcaagcgaggtccaccccgagatgtggatcggtgccaaccgcaagttccgggcagttccgagcgtccggctcgagcgggcccggctcgagaagccccggacggaggacgagcgggagaaggccgagcgccggctggccaagcgccaggcggccaagaaggcaaaggtcgccgcgctcggcatcgactacgacatggatgctgccgccattgtacgtcctgggctgtgccctcgttcgcttaggactcctgctgatgaaagcgcatctgccacggctacacagaaggccacgccgaccgtcaccgaggcctagagctcgtcccctttcgtccccttgtagcaccatccgccgcctcggctttcatctccctacctccgtttgcgcacgaccccgtctacctttgcacgcctatccgcatgcctcatgaacgcacgtcttccatctgagcgtcaggcgctctccgcgaagccagcaaccatgccgatttctcgggcgcaagtaggccaaggattgaggctttcacgggaagatttgaatctgcaagtagcccagaggcaaaagaagggcgttaagaaggctacagtttgagggggcgacggcgacgagcgagacaaggaaatgaggcgggagagggatggtggggggggggaaaggccccctcctccgccgccactgcctcaaataccgggacaaagcgcgacccctcatgcctattctcagccggcgcccttgccgcatcagcagccctatcgccctcagcagtacggcccaccacccccttcgcccgtttacgcacaagggcaggcacctcggtcgcctccgtatgacccgcgagcgcaaaatccgccgccgaccaattttgcctaccagcaccctcatcagcaagcttatcttcagcaccagccccagcagtcgtcgcatccgcaacagcagcagcctcgctaccaaccccagcccagccacctcccgagatcagcaacgatgccgcctcagcacgaagcccatcattcgccagctcctccgcagtcgcctctgcgtccaccacagcagacctcggccgctaccgcttctcagcaaccgatttcgcagccgccgccaccgcggcagccgatacccgactttctctcggccgatgacgacgtaccccagtcgccgactaccttgtcctcacgaacgcctgcggtccctccgccaccgccgcctccaaaccccgagacgctcgcgctgcactcgacgctgcactcgacgctatcgtcttcgcttgaggcggcgatgacggacctgtcgacccgccgggcgcagctcgagcagatcagggaggatctttcgagcgcccagccagcgatcgaagacgagatggcccgcctccgggccgtccgcgacgtctgccggggcgtcggtgaaaggtttggcgcaatcgtcagcgcgggcgacgagcggctggcttggctcgagactcgtggcgaggtcggcgtcgacgaggtcgtctgttcgacgacaatcgtctacaatcagtgcgtcttagggtctgctttgtcgctcttctgcgcccccggactgaccaggtttgctccggctcgcacaggctgattgatctcgtcgccgaggacgcagccatctcggacacaatctaccagctcaacagggcgctcaacgccgagcggatcgacctcgagcgcttcctcaagatgacgcgcatcctcgcgagcgaccagttccgttgccgggccctgattgagaagactctgaagggttgagcccaggtttaggatggaggccgcgagcgagctccggcgttgtatggccatgactacgaacttgctttgctctcgtaagcgccagcgaagcggtgggccgaccatctgcagtgccttgagccgcctgtgaacagggcgacgtccgcgcgcaagagagggcgccggcttgctgcgccgatcgcctgccgtctcgacctcgacctcgaccgacctgccctccctacgaccacactcatcgcttgcgtctcgatcctccctcggtcccctcgctcgccgacacgctcccgatgagcaagctcgcatgatgcctgccgtccgtcagctctgccagagctaggctgcaggacggcgtcctaggcccgtcgtcggccctctggcattcgacccctttgtcctcggccagcggcagcagacagggcgatgcccgtcggcaggcaagcacgctcctcgttcgcaagcgaagggccggtcaggtacgttgtcaggagctggcgcgtccgtctatgaccgctcctggaaatgacgctcatcgttgaggcggacccacctcttcagaagatcgcgggaccctccctgtcgcgctcgtcgtcgctcgcagggccgtcgctctcgcgctcgtcgtcgacgtacctgcggtcagcgcagccgaaggtccgtcaggtctcgaggcagcggcccttcactgcagcgatcatcgaacttgctgactgatgcgaggcatcagtttcgctgcttgcgtagctcctgacaggctcgctcgaagcaagctcgacgccaccgctaccagctcgagccagactcgttggtcgatcttcggcttcttctcgtcgagcaaaacggccgagccaaagccagagtcagagatggagccggctgatgagcgcgccccccttccaccgcttggtgacacgctcgacctctccccgctgaagccggctgacctcattgccgggccattctgtccctaattcgacttcttggaggccgccaacatcccattgtcagaatgggaaggagtgcggccttctcttgctgtctgtgtggcgttgacaaactgaactgatccgccattcaccgaccatggtctggagactatgcggctgcctttctggaggatcgtgtacatctacgacgacgtgcgcatctgccagcgtgacatacccggccgtgactgatcaacttgtccctcctcgcagccgatggacaacgactgcaagctgactgtcttatgctcagacgttgccgccaactgtccgagccccgagcttgcgaagcacttcctgtgggtgccgacccggccagtcttgctgcgctgcacttgcattgaggtccctctccaaccactgcagcgcgttccggcggccggcagaccgaaagaagatgcctaacgttcaggacactccactgagcgtcaaggcactcgactcgacccaggccgcgacattctatgggcgcaactggcgcgtcatcccttccgaattcggtcctccgacggacggtctaggcctcaagtcgaatatgcgcctgctcaagcgctttgccattccgacgcacatgtacaccggcatcacgtttgacaatccatgacgacacatcaatgacttttggttgctgttcatgcacgccactcatggggagcacaatattcatccgaaagaaacccgacacctccacctttgatttcggcccaggtggcgcccgcctacaccccgggctggtcgacatcagcgccgaaggcatcgcgccgagtgcggtcgaagtaagagcctttggcgtctcaaagcgcgaccctttggacttgacatcgcccaacatccacgcccgtcctctgaggtcgttgacagtcgtactgtcggagcctgacaatgcaccgaccgcccacgcccttgcagacctccgtcgtcaacccatggacgcgggaccggccaggcgtggccgacattctagccgaactcgtgcgcgtgcgcgaaaaggaacaggtgagcgaggtctcacgacaacgtcaggtgaatcgacgctgacgcaagcgctgctttccaggatgagcgcccccgccggcaagctgcgctcgaagcccgacggcgccagcttgctgatgcgaaattgtcacagcagagggtccaagccgaggtgagtacggatctcccgttctcccttccattctgagaggccgtctgacacctcgattgacctcgcctgatcaggaacgcgcccagcgaaaggctcaggaagaacaggtccgtaaacgagagccaacgcgtctttgcttcgaacgtgtagactgacgcccgtatcggcttgacaggagcgaatcaaggaacgccagaaggcaggcgcagtggctgaggtcaaggtcagtcctcttgccgcttgacccgatccggtcctcacactcaccttgcttcgcgtccgctctaatcaaaggaaacgcgatcagacgcgcctcaagaatgcgcgcgctgctttgctggcaaggcagcgccaggctgctcagcaaaagacgcagggaagcagtcctccacagcctggacgaccggcggccagggcacccgaaccagttgaccctgcgctgccattcgtcctgcgcgaccccgagggccttgacgcccagctcagcctatcgacgaccggcttccagggcataccctcggacaaagtcgtccgcgacgcgcgcaacgagcagctccaggtctacatcccaaccgcgagggtggcgttcacgagcgcgcgcagcgcatccacgagacctatgatctgctcgcgactggtacgtcctacgagcccgtccaagtgtccaggtcgctgacgagtccctcgatcccctcgccagaggagctgcgggtcgcctaccaggccaaggtgtagaacggtgtgaccgcggttcgacggcgcttcccatagatggtctttctctttgctgcgtcggccctcctggtcgtatcgtatcaatctcatctcatgtgcagaagtatagctgctctagctcctcccacgcgacctcgtcgcactcgacaaccgtcatcaggaccgtccacagccgatcctcgccggccagccagctaccgccgcgcacctccttgcgcttgcgcttggcgcccgactttgcctcgccaaagccagagccaaaggagagcccgacggcttcgtcgtcatcacggtcgtcgagctggccgaggacctcggccagccggcgggcgaggacggcaaagacgttggccccaaagggccggccggcgccttggcggaggattgaccggaagacgtgcggaatcacctgctgcgagctccggctctggcgcagccggaccttgagcgagggtgtcgaggcaaaagcgatcgagtagagtgcgagcgcgatccgctccgacagggccgaccagcgcgggatttgaagccacataaagtcggcgtcggcgagcgggagagcccgagcgagcgagtcgtacagcgtgacgagatcgtcctcggcgaccgaccgtgcgagcagcgcccgactggtgtcgaggaccgtcagttgcgaaaaggcgtcgacggccatgtcaatgacggcggccgagagcatgaccttctcgttggcccggtggccgtcgctcgagccgggcggatagaggtcgacaaaggcgtcgttgatgaacgagctcaggaagtcgacgatggccgccatcagcgtcggcggacatgaccgggccgtgagtgggatgtcgagcgcgatcgtggcgaggatgtggagcgtgtcttgccgcacagcgagcaggtcaaagaccgacagcaagcggtcctcatcggcaacgcaggcgacgagcgagcccgtctcgggatcggccgacaggcctgcgcttgaaggccgacagagcaagaggagcgtctcgagcaggttgaagtcgtacgagacaatcttgaggttctcgcgttgaagcgagaggtcccgcaggatgccgacgaccttgagaatgagcttcgtccgcctcgttggccgtgtgccgtcggccgacgaggcggcgccaaacgagtcaaggacggtcgtgtaggcgagctcgtcgttggcccggacggcaatatcgctttgcgtgagctgtcgtcgccgctggcccggttctgagggggcagctcgcgtcgccgcctcacgctccctgacgccgtcgaggccgtcctcgccaaaggccgtttcctcaagcaggacgacgagctcctcccatagctccacgcaatgctccatcggaaggatgccgtcggcctcgccgccggcgcgcgtgttgaactcacccgcgagcatctcgacaacctggagcgcgtagccgacctcggcatggagtcgcgagcggatcgacatggcgagcgcgtcgaggtcgagcgtgccaaacatgccgacccgggccggcatgcgcgagccttggagtgcctgctgttcggcgaggagtttgtcgacgtcccagcctccgtgcgacacgacaccgcgctgaagagggatgtacgtcggcccggctcgagcgacggccggaggcgtcggtgccgatgacgtcgaagccgagggcccgttgagcgactgctggcgctgcagcaggagctgctgctgaagcaaaagttgcgggttcgtagacggcgattgcgacgaggcggccggagccggggatccaaagggcgcgggcggcagtgaaggggcgtttcctgctgtcgacggccttgacgacggcccgctctgtggctgagactcgagttgtggcggttgtggctgaggtgacgacgacggcttggtgccctgctgcgacagctgtagggatccggtcgatgacgggccgggagagggtgtcggtccctgaaacatgagctgcggctgcgactggagctgcaggtgcgctatcggcgaagactggcctggcggcgggccagcttgcggcacgagcaaggaagacggcggcgggccggacggagttgtcgacttaggcggtatcggcgctgccggtgtgctgacgggcggtggtggaggagtcgcggctgcgaccggcgcgaccgctgccgactgctgagattggggctgctgctgctgctgcagttgttgcagttgctggggaagacccagctggggctgctgctgaccatgctgaggctgggattgctgtggcagttgctgagacggctgccccggctgaggctgctgagcaggatgcacgccttgggctggcgctccagcagggcctcccggcgccggcgacgcggccgccgtcgatcctgctccgttggcaggcgccgccctcgacgcctgctgctgcttcatgttggccgcccgccgacgctgcgtctcgccaaaaaagatctcaaacgtctcgcggaagagctcgggcaggtcggtcgctggcccgcgcgcgagctgctcgggcgtcgccgtcgccagctgcgggatgggcgtcggagccgagagcacgggcgggaggttgatgaagctgcagaagcgagcgatgaaggccggctgaaaggcctgtatgcagagagagcgcggtgcggccggtttcggtcagccggcgagcttgggcagttcgcaaggtcggtgcgcacctgttcggggttgcccgtctgcaacacaggaagccagagcttccaggcttcgagacgcttgccgccgctgctgccgtcaggcgcgacgccctcaccaaggccgatggtaaggtagttcgggttcggcacgccgtttgccatcgtctgggtcgtgaaccaggccggcaggggcgtcccgagcgaggccatcagccggatggccatgttggtgcaggtcagagcggcgttgaggagcgcccgctgctggagcgccgcctgctgctggggcgtcatcggctggccgttgttcgtcggcatcgtcggcggttgcggtgcttgaggtgcgccggacggtccagcggccgccgacgacggctgtacggagggaggtcgcggcccgccgctcatcgccggtagatggccggtctcaagcagaggtgtgcgctccggcagctgatcctgcctgccgaggtctgcgcttgggacacggttgggcgacgcgagcggatggctgggtcgagggtcaaggacctgaagggtcgacgacgagctagcgtgggctgcgaagcagcgcgggccggcgtgcgaggagacgcgacagggcgagcaagcgagcatgcgaaagggcgaggaggtcagcccagagctcttctcaaaggagcgtcggcatggtccggcgacggccctccatccgagcgtgccctctatgcccatccgtcgcgtctcctcccgaagcgagacgcgattaggaaggtcgcccaagcgacagggttcgggccgatcttgcctgcccgcggcgacgagctgctggctcgctcgcctcctgtctcctctcctccccttctcgctcgaaccgggatagaggctcgaagacggtcgggcggctcacgcaccttggaccggggccggataggacgcgcttggctcgacgggtcgccggatgctaagctcttgtcggtcgtccgtgtggctgcagtcgacgtttgcgggagcctgggctctgagacccacgccgccggctgcaacccgccctgcccttccctccgaccttcataccctctccatcacgcccgaccgccctcgtctgcttactatcctacaagacgtcctgtcgccatgtcatcaacaccgtcctactcgatcgtcatcccggcctacaaggaggtgcttaacatccggccgctcctgacccgcctgcgcgcagcgttctcgagcccagcctcgcccatcccgctctcggccgtcgaggttctcatcgtcgacgacaactcgcgcgacggctcggtcgagctcgtgcatgagctccagaaggaaggctttcccgtccggatcgtcgtccgaaccgacgagcgcgggctcagcagcgccgtcgtccgtggcttccgcgaggccaggggcgaggccatggtctgcatggactgcgacctccaggtcagtcacctttggcttgaagctcgataactcaaaagaagtttccccagcgagcgcttttgcgctgctactctgaacgctcgctgacccgcatctctcgctctccccatcgtgccacgccgcagcacccgcccgagatggtgccgacgatgctctcgtcgctctcctcccggacacccttcacgctcggcacgcggtacggacctggcgtcgcgatggacgactcgtggccgctctaccggcggatcatctcggccggcgcgcgctacatggccctgccgctgacgaccgtcagcgaccccatgtcgggcttctttggcatccgcaaggaggaggtctgtcccgccgcgcgcgctctcctgcgacatctcgcaccgatcctcgcggctgatcaccgaccgcccatgtaccagttctcgaaggctcgctcgctgaactcggacggcttcaagatcgcgctcgacctcctgctcaaggcccagatcccggcatcaggcgtcgccgagatcccgttctcgtttggcgtccgggccgagggcgagagcaaactctcgggcaaggtcatggtcaagtacgtcgagcagctggccgagctctactggtggaagttcggcccgctcctcatcgtcctcgccctcttcctcctctttgcgctcgtcgccctcttcctgctcgtcaccggtcgcgagttcggcacctggcactagagccgatcgcaggacgcatagaacggccaggcagcgtctcggcggcctttctctccgccggtcggagatacccatgagcttcgcactctgcgacggtccctctcgcactcgcgcgctgacgttaccggtgccgctgacgaccgcgattgacaatctgatgtcctccgcaacattcagtcctctgaggttcggcccggctcgtcttcgacgtggtcggctcgtcgacatagccgagctcgcggtcagctctcagggcgcgttcgaggaatttcctcgactaacaccgcgaaacctcgcgccgcaaatcgccgcctgcctcgcatcttccagcccagctcggcccttcaactctaccgtccgtcggctcactcgtacgcttcagcaattggctctggctgaccaggttggcctgcatgtcccaaatttacgccggccaaagcccaagttgtcgcccatatcggcccgactggtctgctcgggcgcaatctgtaggcgcgctgttgtgacgccaccgccaccaatccacgacttcccttcatccggcacgctcgacctcggctcgaacctttgtcgcggtcgacgatcatcacatcaccgacggacctgttgttctcgataaaagggcctttcttcaaccgccaataatatctccgctgagcatcgagcccgccacccgggccgaacgcgccgacgtctcttctgcgtgttcgcaatgcgcttgggagaaggacaacatatgagtgcacggctccctttcgtgcacaaacccttcctcagctgagaacatcgtgcgccagagcagtcaaaactgcccaacggagtcgcttgccaattttctcactcaatcgccatcctcgctctctccctgaccttccctcgcctcgccatgtcgccccttgcctcgttctctcttgccggactcatccttgccctcgttgcgcaggccagtcctggaccgaccgctgtcgagggtccggccaagcgattccagccttcggccgccaacaggtgcacctatgtccgtccgtcgatcgctcaccctcatcccatgcccctcgagccgtccgctgataacctctcctttcgttcctagacatgcccggtcttcaacagcgtcccgggtattcccactttcatcgacaagaccttgaaaccgacgctgctcggaccgccacccttccagcaggatgggctgccgccgctaatggcgcgctcatccttgacccagagatgtccagccgcggtcgcgcgcttacaccaacatgaactttcagcgtggttcgtcaggcatgaccacaacggggtgtatcgacacctgccgctcaagagggttttcgatcgccggcacagaagcttcatttcaatgatgagtcttctgctcggacctgtctgagcgatgacgtctcgctgatcttctgcgccccgccctttccagctactgcggcaacgagctcaggggcggcgcggaactgacgtcttactccaaccgccaaatcttgccctacgatggcaacactcagcaaacgtgcggcggcgactggagtctgagcatcttccacgacacggccaagcacaataccgacctgagcccgagggctgcctcgcggctcggcaagcggtctgccgctctggccctgaggacggtcatcgagagggtcacccatacgacctgcacgtgagtcctctgccccaagacgtccctgccgagtctccgacatcaagactgacatgcgtctctcgcatcccaggtacaacgtgccgagctcgcccgaattcctttactcggccacgggcggcgtagccgctcccggtcaggacttccgctgccctcctgcggctgtcccgaacgggccgtgctccgcgaacggccgtcgagatctcactgcgctcgaacagtcagtcggctgcttcctttgaaggcctcactgtcgccaaatgaccgctgatgctggcatctccctccgaacgctccaggaagctcaagtggcgccagtggtcgccagccaaggcgagggcgctcgccgctcgacgtgctgctggagccgtcgaacgattcgtatcagtgaggacgcatgtcgcgccggaccctgccttctccactcttctctgccagacgattctctccctgccgcttccttcgttcgcgcatctctgtttcttctgccatcgtcctttcaacttcgttcccactctcttacagttttgggcttcttcatgacgactcttcctcagcaacttccataaaagcccagccatcatgcatgcttcccggctcgacggagtcgtcgtcgacgtgcccgactcgcactcgttcaagattggcattggccgggcgttgctggttcgcagctggctttgctcgccgggccagcggccgccctcctccgctgctcgctcgctcgcagccatctgcagccctcgcgacgaccagccagcacctcctcgccgccctcctctatccaacctcccttctcgtttctgcttgcttctcaaatgggacggtgcgtgtcgcttctctcgctctgcgcgctctcgccgctgatgcgcaagccggaggccatcggcgcccgacctccgcgagccaagcgctgacctctcggccttgcctccgctgccctgtcctcgccctctcaggaataccggtctcttcggagccgtccagggtctggatgcctttggcaaggcaagtccgcaacctgctggcacggtctctgtggcttctgagcctagtcagatgcctttgctcacctcgccggttattccatcgggccctgtagacgatggaggatgtcaagatccggactcgcaccggagcgctctgttcgttgacctcagtagctcgctcgcttcgggcgagcttctccctggagcctgcgccctctgcttcaggatctgacccaatgtgcctctttcgccgcagtgacgctgctgagtttcgccatcatcctctcggcgacgctgctcgagttcatcgactaccggacggtccacacctcgccctcgctcatcgttgacaagtcgcgaggtgagaagctgacggtcgacatcgacattaccttcccgcgggtgccttgctaccgtacgtcggcttgagcacttcaagcgaggatcgtcgagcgagcgctgacggccgagctctcttccctcgactgcggcgcgacaacggcgcccagtcatgagcatcgacctgatggacctcagcggcgagcaccagaacgacattgatcacgacattcagaagatccggctcgatgagaagggcaaggtcatcgacatccatggcagcagtacgtccctgcccttcgcggaggtcgagcttgcgggtgctaaggcattcacagaaggccaagggctgacgcgcgactggccgatcgaccatagagctgaagggcgacctcgagcaggtagcgctcgtccgtggtaaggactactgcggctcttgcttcggcggaaaccctccggcgtcagggtgagttcccttaagaggttggccgactcttcgccggcactcgcacctgacgtctcgcgccccgcgctcctgcaggtgctgcaacacgtgtgacgaagtccgcgaggcctacgtccgcaagggctggagcttcacgaaccccgacggcattgatcaggtgcgcggccgtgctgccgaccctcttgaagcagacgagtgcagggcggctgacgagacggtgacactcgttgccccggcggcgagcagtgcgtcgaggaacactggtcggagaagattgatgcgcaaaacaaggagggctgcaacgttgccggccgcgtgcgcgtgaacaaggtcgtcggcaacgtacgtctgacccacggccagtgcccgttctgatacgtctgctgacgacccgctgctggcctgctgcagttccacatgagccccgggcgctccttccagtccaactcgatgcacgtccacgaccttgtgccttacctccggtccggcaaccaccacgactttggccacgtcatcaaccgcttctcgttcggcgccgacggcgacccgcttcagccgaccaaggagatgctcgctgtcaagaagcggcttgacatcgtcgacccgctccagggcgtcaagggccacaccgaggagagcaactacatgttccagtgcgaccttcgcatccaattctggacgcagccagccgtctgacgccgcgctcgaccttcttgcaggtactttatcaaggtcgtctcgacccaatttgtcagcctctcgaatgtcatcacgccctcacaccaggtgcgtcgcaaagcgcaacgaactctctcgcccggctctagctgaccttttcggcccgaccgcgccagtactcggtcacgagctacgagcgtgacctgacagagtcgcaggctccgggcaaggactcgcacggccaagtcaggctcgcttctccgccttaacatgaacttgagcgctgactcactcatccctcgactcgactctttcagatgaccgctcactcctcaatgggcgttccaggtacgtcccctatccctcgcttcgactcttgacacttgatgccgggttgacctttgctctctccgctcaggcgtctacttcaactacgagatctcaccgatgctcgtcgtccaccgcgagtggcggcagtcgttcgcccacttcctcacgtcgtgcgttccagagctcgactgtgttctccactttcgtttttgcccagactgacttctttcgatcgctcatttcttcaggacgatggccatcgtgggcggtgtcctcaccgtctttgcgctcatcgacggcgccatcttcagcggctcgcgccggctcggcagcaagggtgcgaacggcaagggcgagcacgaggccagcagctatgccggcctcaacggcaagctcctttgagaaggaagaaaaaggggcggcgcgctgccctctggagcgcttacctgtatcacaaagactgcctcgcatttaagtcgccgctgtccgacgactgaaagtcgggcatgatgggtgcaagctggctaagagtatcgcggcggctcctcccctccctcgtcccgctcagtcgccctcgttacaccagagcccgagccgagcccgtcgccggcgtaaggcggaggaacaacctcgggccctggctgccgcgcgagccgccgggcctccgaccgtacttcggacggatggggcggcagttggtcgatctctgtcgttgctcgttcaaccgcgagttggtagaactgcggcgggtcgtccgatggggtcgctggcgagagcgccagatcgcggaacgtcggtggcaggtcgttggggtcgtcaacgcgagagccctcgcgcgtcatggcgacgatgcttgtgtgcgaggagccgccggccgctgacgatccgccagacgaagaggctcggagggccgacggctggatcgaatcgtagatttgttcgagtcggtctctgtcgacgccggatccctcgccctcttgcggcgggtcgacgctgccctccacctcgaggccgatgctgacggaaggcgcaggcagactgaacgtctcatagccgtcgacctcgagccagtcagctggcaggttggccggatcggccgagggcgacgtcggtggtgcaacttgcggaggtaggttgaggaagggcacgagcgacgcgtccggctcggcgaccgctccgagcggggcagtggactgggagagctctgtctggggtaccgactcgaggaaggtcggtggcggaggagacgggtcctgcagagtcgagacggcggtgaaaggcggcggcctggagctgctcgacgacgacgtgttggcgcctgttgttgtgatcccacgcggaaagtcggagaatggaggagggtcgctcagcggcggatgctgggtcgagcaggataggacggacgagctgaaagatggcagggcttcgacaaagccgggtggcgatgcgtaggacgccgaggcggagaaggagggcccggcgccgtccgactggcggtaggtctcgccctcgtacggcttctccttcgtgaagggccgggcagcctcaacggcagcaggggcgatactgggctcaagagcatgtccttccgagtcgttgacggcaggagaggccgaggccgaggtcgagtccgagaccggttcgtctcccgcctcgtcgaggtcgccgaggacgacgatctcctgctcacagtcgacctcgtcaatgtcggcgccgacaaagccgaccatgaccttgacccagaaacggacgtcgatgtgcttgccgccggtcgcggcgacgtgctgtgtgagatgcccgcacgtgagctggtaggccgacgaaggcgacaggggcgcatggaccgagaggcggagacggatgggcgagagtggcgagaaccggcaggacgagccggtcgtcgtaaggagcgtcgagactgagcccgagccgttgctgagaccagaggaggtctgtgcgactctgctgagcggaagggcagcgtcgagcgcggatccctggtccaccgcgagagcaccggcagacgccgccctcaacgacgacgacgcggtgtcggccgatgaggttgtgaccactcgccagagctcggctcggacgttgcgcaggcccgcaccacggtcgagcgcctgctgatcggggatcgggatctcgacccagagccggaccggatccgacttgcgacagcgtgtctttggaaagccgacgagcaccggagtcggtgtcctgccaggggcgggcaagggccggatcagaggcgcggcgtgcgacgagggtcggccggacgggcagaggtggatctccatgctctcggtggcaacctcgaaaggcggcggtgtcgatgtcgaaggtggcggtagcagcgtgagctgggcactgagcgtgtacgagagggacaggcccggctggtgcaggcattgcggcagcgttggcgagatgtcgatcgcgaactgctgcctcgagctgttgaaggtcggccggcctaaagctgcgagcgaatcggctgggacgtcgggtcgggttgacgacgaggccatcgaggaggaggtcaacggcggcggcggaaagacgacgatgctgcgctcgaagaggagctcctccggccggcccttgcgacgcagcgcgagtttcagagcaaccgtcctgaggttccgaaggtgagaaatcagcagtagctcagtcttcagaagagcaggaacggcaggcagacgtacagctgctcgacccgctcgggcctgacgcccttggtcatcacctcgcccctgacctcagcggagctgccctccggccccgtcggctggccgtcggccttccatgcaaccgtgccagagctgccgccgtcgatccaggctagcaggtgcggcagcagcctgccagataggaaggttgaccggccctcgagcggagtaaggaggagcgagacgccgcttgctgctgccgggcctgcggctgccgttgctgctgacgaagggcctgccggcgaggttgatggcccgaccgggtcggcaggtgcaagaggctcgtgtttcggagctgcgagcgccgaataagtcggcgggtccatcgtcgggcgaggtgagatcgtcggacggtcgcgagggtgtggaagggtggcgggtcgacggcacgagctcgtcggcggccagctcgaagccgcctgggaacgctctgaaacgagcccctttcccttgctcactcggcattgtcgccggtcggtcacgacgaaatgagtgtcgcaagcgagcttagtacgctcagtggtagggcaggactggacacacgtccatgtagaatcccaaaataaagaaggaagaagggcagagaggccaagaaagacagataaagacgaagacgaaaagaggtcggtctcgaggccatcgaaggagaagatcagtatgtagaatgtattcaggccgccatagcacgtcgagcctcaagagcccggccctttgctggcgaccactggcgatacttgagcttcctagaggtccggatcgcaatctgagtgtcagcggctggatgacgagagcgacagggtgctgccaggcgcaaaggactaacctctcgagcggagtaagagccttggcgaagccgcgcttgatggggcccgtaccagtgcatgtcccgaccgagacggctataggaaggcacgaggctggctgaccagtaccaagctggccgccggacgacgagtagaggcagcgagttgtatcgggatacctggagcaaggcaaggaggttagtctcgaattaagggggaaggtaggcagggtgcagggcgactgacgagcagatggtgtaggcggtggcagctcgggccctcagagtcttcttcgtgagatccgggttgagacgggccgagtcgtagaagaggctgttggcccatgctccgccacacgtctgagcagcattgccatcgcaggccatgggcgtgaaagccgagaatgaggtgagagtgacgccctgatcgagctgatcaccgcagtagctaagggcaagaggcgtagcgggaaaggtcagaaagaggtcaaggagcggtgatgaagggcgcttccgcggactcgccactcccggccagtctggacgccagcaattgcgaagccgccactggcgcaggcatcgacgcagccgtcgactgtcatcagcttgttgccgggcaggacattccagtagtgactgccggagagcatgcgctggcggtcgcctccaagacgatacgcttcagcgatgagcgcgccaccagcggccggctgccagccggtgcggagaccgagtgaggacgagtcgatgatggccgtctcgccgatgtcgatgccggcaacgccgttgatggaagggcagacctgcagtggggcgtcgcagaagaagcgcagtcagcaggcgaagaagacgagcgcacaaagtcccctccttgaggactcacgaaggtgcaggtcctgccagcagatggagcgaatcgcttcgcagggccgtcgacagcggtcgggccggcctgaacgacggtcacgagagcaaggacggcgagggccagaggggtagaagagagcatggcggggaggagagagagatctggaagggagggtgagggttgtcaagaagaaacaggacagaagaagggggcgcccttttgaggacttgagggatgagtccccaatcgccaaggggctccgtttcgttccgcgaaggcacctcatggttccttcgggcggcaaagcacagtcaaaagagaggcgtcgtgcgcgactgtcgcccttccgaaggtgttacttcaatcaaaagggtcgtcaggtcagccgaggccaggccggaagggcgacgagagcgacaacagaagggtgggtgcgaggcgtttgcacgtgtcgcgcaagtgggctaaatcggcgagtaggaaccggccggtcaagattaaaggcgcgtgcgcacaaaaggggagaacaataagtcgcgagccgagtccggctgggccggcgtgcgaacatggtttgggccgagagccgtagttgagaagtgagaggcgagaggtttgggcccgcgcggccatggaattcggtctcgatcgccctaaacccccgaatatggctgaagttgggccgcatttagcgtttcggacgcattggctaccggcttcccgcttccgaaagcgtgcgagcatctccttgcagctgttgtgcgtgggaagggcggcgagacggaagacggtcgacctggtgagctgagcccgggtccccgaggcgacgtctgctgtttgcaggacgagggcggagcctgttcgacgcttcactccgtccgaggacaaggatgcgaacggccgagggcgaccgctttgcgatgagacgggcgaagtgcgcaacttgaaccgtgagaagctggtcacaaatgctggtcagccgccgggcttcgtcagcggtcgacctgaggtgacaagggggccaagcgaacccgatcaggatgtgcaaagcggcaaagcacataggtatctccgaccggcggaagatgcgctccgggataccgccgtggcagcactcgaggtcagcgactcgctcagcggcccaccagcagctgacggcttgtgcaaagggcgcgctgctcagaaggcctcggcgacgagagcgccgacccaggtcttgcccgggccgagctcgaagaagtgctcgacgtatccgggctcgacgctgcaggcaggaacaaagagagttggtcagcgtccgacaaccaaggcccatacctcaagggacgcaccagatgtaacgctcccagcccttgtcctccatgtcggccatgttgccgccgaccttgggccccgggttccagacggtgacgtcggccatgccctccgtcttcaccttgacgccgcccttgccggccgggccgtacgtcatcgtcgcctcgtccggcgcggcgtggtagacgcggtccgtctcgtcgtcgagcgtgacctcggcgcggtcctcggtaaagtcccgcccgccgcgcgtcttgtcggtgtaggtcaggcccttgaacggcgtgatccggccggcgtgcgggtcggggtggtggaagtaggcgtgtaggagcgcctggaaaagcaggggctcggtcgacgacgggttggcgaccttgagggcagcacggacggccgtcgcagagagcgtgacggtgtaagtcagacggaaggcctgcggaaagaccttcttgatctcgtcagtcggctcgagcgctagcggcgaaaggggaaggagggcagggtatcagcgacgcaagcttgcaggagcgctgagcgtacgaccgacaggcaaaactgaccgagctcgacaccgtcaggcagttcctgcgagatggtccacttgctcgtccgggcgaagccgtgctgcgggagggcgctgtgcgccttgagccgcgagtccgccgcaacctgcttctctcccggcgcgctgcggagcagagggacgagacgtcgaacgaggaaaagttagccgatgtgagccctggcacgatcagcgagagaaaggcagaacgaacgggccgaacgtaggccagcagattggcacgccgccacggatctgacgagggcgggccgcgacgtcagctcttgcgcctccagacaccagctgagccatctccgttcgatgcaacgccgccgcccgcggaggagtctgccctccgcgtgtcagagagccttctggccccaagctatcaacgtgctgtcgcttggacgagctcgtcgtcgatatcctgcagtcgcatgctggtggccggcccggcccgggacgcggtcccccggaggacgctcgagcgcatctgctatcgcctcgctcgaggcaagtgccagagcctcgggcatgtatgggttgatctgaagggcttgcaaccgcagacgaggtagcctacacgaggcggagaacaagggactcacggccttggacccgtcgagtgcggccttgccgctgacgaacaggcgctcctggccgtcggccgtcttgaacgaggtgagggtcgcgccgaaaaggctggagtcaggataaagaaggacagttagcctgtctgttctcatgtcagcttagctaaggacgtactagagctcggctgtgctgccctgcaaggtcggttaggaaagaggaaggcggcgcccggtcagcgcggctgtcgacgaccatctcgcgcctcctctcgctctcaagcgacgaacaaacagcctggacgtaccgaggcgtgcttgagcgagagcttgccgtcgttgtttgtaatctggatcgacattgttgtacgggagatagatggtcgtgactggtgggctgaaagagatgacgctcctccctccgagacggctgcgctcgagcgggccggccgaaatgcttgcccttgccctgctgacccgacaggtctcgccgtcgaaccatcaacagccccatctccagctcgctccatcctctgcccagccatgcgtacgtcgttccctgagcctagcttccgccggccctccttgcggctgacccgacccgcacgccgcaacgcgccgcagcttccgacacaacgccgctgctctcgcgccggccgagccgccctgcccggcgggtgccaggtccgattccgtccgccctgcacctgctgaagagctggatcaacattctcctgcttgctgcgccccttgcgtttgtcgccgagcacctccactggtcgtgcgtccttgaatttcttgggagtcaggatggagagaagaggccgttgccgcctcctgtcaacttgccgccgggctcgcactgacccgctgcttctacacacttccggccgacgtctgactgacccatcacgacgacagtgccaagtggcgcttcatcctctccttcgtacgtcaagccatcctgcccgtgcagtcgctttttaggacaaagactgaacggcgctccctccctccctcccgccaggtctcgatcgtcccgctggccaagctcctcggcgatgcgaccgagcagctggcaattcccctcggccagacggtcggcggtctcctcaacgcgactttcggcaacgccgtcgagctcgtgcgtcctcccattgccttttctcttgcaccggatgggccttgggggagattctctgcaggatcgccctccgcggggaggcaagcccggtgacgtttggcagtcgcccgccgcgcagccgggtcgccgggcaactgccgcccgcccgcctcttcgtccagagcctacatgcccttgtcaccaaatcagccgacaagctgtgcttgtcttcaacaggagggcctctaattgctctctctctctctcctctcgcccgcagatcgtcggcatcgtcgctctcacccagaaccagctccggctcgtccagacgtcgatgatcggctcgatcctctccaacatccttcttgtccttggcatgtcgttctttgccggcggcttccggtgcgtcctccatcactggtcggctgtctctcgtatcctcagtgtgctgatcgccccttcctcctgtgcagcttctccgagtcgaccttccaggtgacggccgcccagacgatggtctcgctcatgacgctctcgtgtgcgacgctcgtcatcccggccgcctaccactcgtcctacaagtcgatcaccgcctttgacccgtcgagcgtcaacgccgccgtcgagggcatggttggcgcccttggcgagaagaaggaggccgaggagcgagggctgctgctgctctcgcgcggaacggcgatcatcctcttctgcgtctacatcggctacctgtgcgtctcctgacccttgtctcgcttcatgcacggcggctaatctcctttgttgtcggcccccgctccgcagctggttccagctcaagtcgcactctgatctcttcgaggccgaggactctgaggaggaggaggaggaccttgagatgggcccttggtcggccggcgtcgccctagctgccatcaccgttctcacgagcttctgcgccggtccgtccttgcgccgcacatccccccttccatggtccaagtggcgctgacgccatttctcgcctctcctgtcaccacctgcagacatcctcgtcagctcgatcgacgagacgtgccaggagtggaacatccccaaggcctttgtcggtctcatcctgctcccgctcgttggaaacgccggtcagtgccccgaccaccatccagtgaagttcactagatctcgacactgacgtctggcacttctccttctccttcagccgagcatgtcaccgccgtctggatggccatgaaggtgcgccgaccacgaatgcttggatcggcttgccaaagcggctacgagactgacggccttttctccccttcttattgcagggcaagatggagctaacgatgggcgtcgccgtcggctcgagcatccagatcgccgccggcatgagtgtgtcccttgctccctcgccagtctgccctgtctcacccgatgctaatactcacctccttcgctatccacagtcccgatcctcgtcatccttggctggatcatcaacaagcccctgacgctcttcttctccgactttgagacgatcatcctctttgtctcggtcatcctcgtctcgagcctcatcagcgacggccggtcgaacgggctcgagggcgtcatgctcatggccctctactttgtcattgctctcgcctgtgcgtcctgaccttggtgggccgccggctgattcaggtcgacccttgactgacgcttgtgtcctccgcttcagtctgggtctcataaacggaccagaaaggcgacccttgccatcagcgacagctggagcgcacacgcccggccttcgtcacgtcacaccaccctttctcatcaaccaagagcccaaacacggtcctccctccctccctcgcgccctttgccctgccccttctcgctcccgttctcgcactcgctcgcaaagaaaatatcatggaaagtgcccagcaaaggttggggtccatgaagtgcgagagcttcggcagcaacgataagaatgggagcggtgccgatcagggatggattccgggcggcgtcgtccgccgttcaaggaggagcggcggcgacctcgggcgttgtcgccgccggcatggcatgagctcgctcgctccgtctgccgaaactccatttcgcttgggccttggcagcgacaggaacgtcccggcatctcttgtgcgttgccgggcaagcacgttcatcgcagggccggcccctttccccatcgccgagcccggccggtcgggcgagtttgcccttgcgcccctccgagcagaccgtcatctctctggcccacctcgatgtcccatccggcactccggccggctcggcgagcggctctcattcggcagccagcgctcgataagaagggagggaagagggagcctgctcactcacccaccccaccatcgcacccgctcgttcacccacccgccagcacccgctctcaccacctcatcgtccaacctaccttcgaccaccctctgctagcccttaacccacctcgccggccagaccagccatgcctgtgtccctcgccggaaccattgacttcaccacctacgaccggtcctcgagctcgtcgtcggccttgcccgccggcgcgcagcccgaggccggcccttcctccctcctcgccgagctctggtcgaggttcgtccctccgctcaagcgaattatctcgtctctccctggccatctgcttcgcccactgacacactgcctgcccacgacgcaggcaccagctcgagcgccgggagctgctcgaccagtttgaccacgagcccgcgccctcatcctttacgccgaccgcatcctcgagcacaggcttcgctgctactgagctggcaagccctgaggagctatcgctcgtcgcgctctcgacgtaggtgctccttcctcctgttcctccctcctttattgtcagtgctgacgtgcatgactttcttgcgttgacagccggcacacgagttggaccgccctccttctccggcacggcgctgagctcgaggtcgctgtccagcagatcgtcggccggcctccagcctcggctgtagcggcgtggagcacgacctccgctgccgaagggggatcgacggacgagctcctcttcgcgctcgacgacgtcgacgtcgggtggctctctaccgaccaggaggatccggccgccgacaccctctcgatcgcccctccgacgacgcatgtcgccagccagggacaccctggacccgacgacgccgagcacgggagcctgctcctgcagcagttgctcgcttcgccggccgtctcggccgtctcgaccgcgtcgtcgtcgtcgatggcgacgtctgcctcgggcttgtcgttcgggaactgggccgattggtcgcccgagggcaagacgtcggtcggcggtgacctatctggccagactgaaccgtcttcatggtgcgtccgcctcccctaccactgacactgacgagtccggcctgttgctgacccctttccttgtccgtctacttgctctcgcaggtcgagcgacttcgacgccggcctagagcagatgttcagcctcggctcgcccgccctgagcctctctcagcccccagccctcgagctcgcagctctgctaccgccggcagcgctcgccttccagccggctgacctgctcggcacagtctccaccgccgagggcccacttgacacctttcctgccagcgccgccggcgagtcgagccgtcggtcgccgaccctcttcgcaggcttcgcatccgccaaagccgccccgacgacaaagacgacggccgcgaccgcctctgccggcccgtcccgtccgctccggcgctcgccaaccggcggcccgctcgagcgctccaagttttcgtgcgacgcctgcctcctccggcggaaaaagtgcacgccccacccgagacccgacggctccctcccgcagatcggcgattgtgcagactgcgtgcgcgacgcggcgaagaggcggctcggcgccgtcgagtgcacgtacgacattcggaggacgaacgtcgaccgcgcgcggcggaacggcagcttgcgcgaacccttccaccacgttctgctttgaaggcgacctctcttctctccttcccttcctctctgtcgacacctgcctgaccgacactctccttgacgacctgctttagcctcgcccgactctgcccgccctgcttgtcctgtagttctcctttctctcttactgtatcgcctttacgccttctcgttgtacgcttgctctctcactcacatgcccttccctgacaagcttgcgtgattgacgacagacacatgctattacccgaaaggaaagtaaccgttgaaaaggaggttttcgcggagaatatgccggatctctaagatgatgtgaacgagttgaaggacggagagcacctgcgctctttgcgtcgaggggtatcgggtatggtggaggtggcggtaaaggaccgcgtgcaaggacggaaagaagccaagcagtgagggggagagtcaagcgggctgctttattactctgtgggagtgagtaccagaagaaatagatcagcaaacgaccaagatcgagcggcttgaaagggatagcacgtactcttgagcgaggctacggcagacttcttcttggcccgggcggcggccttcttgctcgaccactggcgggccttgagcttctgctcgagcggcgtcagaggcttcttgaacgaatgtgcggcgttgttggtcgcgggcatgccggcaacacaacccgtctggtcgcacggtccggatgagacggcggttggaacgcagtcgcggtaaggcgcatcgttctcgatgtaaaggccggccacgagcttgccggttgaagtgacgtatcggcagatgaccgtggaatagctgagagtggagaaagggacaggaccctgccggatcgtcaaaccgacgcgcccaccgcagaccgaccttgtgtccgacctccggcgaatagtagtcgtcgtcagcgtccagcgataaagtcttgctcggctgccgacgtggcaacgctggccgccgtccatcaacaaccattgagagccgatgagggagtggtggagccggccattggatgcgcgagccgccggtcgcacccacctctgactcccggaggcgtctgttgcaagcctgcctgtctctgcgcggccccagcgcctccttgctcaagccttgtcatatcgacggtcagcggtcaccagacgagagggtccactttcgcaggcgagcaggcgagtgcgatgacagaggtcgtgagatagcagagggcgtgaggggatagagagaccgaatgaaaagagtagcaagagtgcaggattaaagcgacgagcgagcgagggcagaaaagcaggagggcacaaaggggggacaccgagtgagagagaagtaggaaggctcctctacttcttctcggcagccttggccttagccatggcgttgagggccgagccgttcttgaaccagacaatctggccgtcgttgaaggtgtggttgagcgagatggtctcggtcgtgccgtcctcgtgcttgagctcggccgtcaggggcttgccctcggcaaactcggcgaggccgaggatcgaaatcttgtcggtcgccttaaccttgtcgtaatcggcctggtcggcaaacgtcagggggagcatgccctgcttcttgaggttggtctcgtggatgcgggcaaaggaccggacgatgacagcgacgccgccgaggaagcggggctcaagggcggcgtgctcgcgcgacgagccctcgccgtagttggagtcgccgacgacgacccagggaatgccgttgtcacggtaccaggcgccgacggtcggaaccggtccccactcgttcgtgacctggttctggaccttgttggcctcgccgttggcgtcgttgatggcaccgatgaggcagttctattccaggaaagaggagacagggcaagtctggggtcagcgaccgaggcaagaggggcggagacacgaaaggcgactgacctggctgatgttctcgaggtgaccacggtacttgagccacgggccggcggccgagatgtggtcagtcgtgcacttgcccttggccttaatgaggacggggcagtccttgtagtcctggccgttccacgccttgaagggcgtcaggagctgaagccggtcagacttggggtcgacggcgacgttgaccgctgagccgtcctcggccgcggcctggtacgtgtcctctcccgggtcaaagcccttgggcgggagctccttgccacggggctcagagaacttgaacggcttgccgtccgagccgatgagcgagtcggtcagcgggttgaacgtcaggtcgccggcgaagaccatggcggtgacgaggtcgggcgaggtgacgaagcagtgcgtggccgggttggcgtcgttccggccggtaaagttgcggttgtacgaggtaacgatcgagttggcctcgcccttcttgacatcctgccggtcccactggccgatgcacgggccgcaggcgttagcgaggacggtgccgccgaccttctcaaacgactcgatcaggccgtcgcgctcgatcgtcgcgcggacgagctcggagccgggggtgacgttgaaggcgtgcgacttgatcgaaagaccgtgggcggctgcctcgtcggcaatgtgggccgagcgcgtcatgtcctcgtacgacgagttggtgcacgagccaatgagtccgaccttgagctcggtcggccacgagttggtccggacagcctcggcaaacttggagatgggcgtcgccaggtcaggcgtgaaggggccgttgatgtgcggctcaagctcggagaggttgatcgtgatgagctcgtcgtactcgcagccctcgtccggctggaggttggcgccaaactgcttggcgtacttggcgacgttctcgcgcttggtcgccttgagataggcctcctggcgggagttgaaggggaagagcgaggtcgtcgcgccaatctcggcgcccatgttgcagatggtcgcctggccggtgcacgagagcgactcgacaccggggccgaagtactcgacgatggcgccggtgccgcccttgacggtgaggatgccggcaaccttgcagatgacgtccttgggcgtcgtccagcccgagatcttgccctcgagcttgacaccgatgaccttggggcacttaagctcccaagggatgtcggccatgacgtcgacggcgtcggctcctccgacaccacaggcgacctgcgaggcagagaggacgagagcaaggtcagcagactggcaaccggccggagatagccagacgacaaagaggggcgcaccatgccgagaccaccggcgttgggcgtgtgcgagtcggtgccgatcatcatgccgccggggaaggcgtagttctcgaggacgatctggtggatgatgcccgatccgggcttccagaagccaatgccgtacttggcggtcgaggtcgcgaggaagtcgtagacctccttgttgatgtcctttgcgcgggcgaggtccttgatgccctcgatctgggcctcaatcaggtggtcgcagtggacggtcgtcggaacagccgtctgaggcatgccggccgacatgaactggagaagagccatctgggcggtggcatcctggcaagcaacacgctgaaaataggtaaaaaaggcgagatgaagagaaagcgtcagtcaacacgtccgtcttctctcgctcgctcgctgtcaggctggcagacgcacgtcagggcggagcttgaggtacgactggccgcgaacgatctcctgtgtctcgggctggtcgaggtggccgtagacgaccttctccgagaacgtcaagggtcggttaagcctagaggaaaaaagggcggggagaaggtcagttcataggaagcgtaaagtgcactcgagacgctcgctcggcttgtctgacccgcgccgccatccttcgtcgacggtcgattgggaccgaggacgagatggtggcggtgccgcgagacacgagctaatgcgagacgcgggtccgacgcaagggctgaaaagccgaacgaggaggaaaagagagacgtaccgcgagcggacgatggcgaggttgtcctcaatccgctggtagttgatgtagtctgggttgaagacagcgaaagggcggagtcagccaacgaacgacggcagacgggaggcggacggctgctataggctagtttttcggagcgaccggacgagggcagaggacgagccaggcacgacgtgaccggccgcactccatccgcgtcgacccagagcgcgagagaggaagaagggactgacgggtgcccttgtcgagctgcgacatgatgaccttggtgtcgccaatccgagggctggccgtagccatgccccggggcgagacctgccggaggatcgaggggatgttcttgagcatctgggtgtcggtcgaccaggcgggatgtggcgagagggtgtcgagtgtccgagagagagagacacaggaagtcgagagccgggccgagtgtcgagggatgcgagagcgagaggaagagagagagcgagaagggagggcgggccggccggtgaaaagagatgcgagggcgggcgagggcgagcgcgagggcgagatgggagaggtaagaagagagcgcgcggtgcgtcagacaggtgttaaagagcgagatcagagtatgagaacaaggaagaccgacctttattcctctttatatatgccttgtaggaagggcaggaggagaaggtggtggtcgggcgcgagactgccagggacgaatgaagagcgccctttcacgcgcgcaggaccggccgaaacgacgacggcccggccgacgacgagcgaagggcgacaccgccgccggcaacaggacacagcccgcagccggtcgaccgaccatcccgaccggtcggccgtcgacagtacaacagccagctcggttccagctcgccagccagcaagcagcagctctgtcgccttcctccgtccgaccagcagcaacgaagggctgactctcgcaggcggctcatgacgacgctgccgcagagtggctgcgcgcggttcaaccctccctaccccgcacgcccgcccgcacccggaacgacccgagagagggccagcatgggcaggacgagcgccgttgctgctggctctgcctgcgcgctgactttcttgccggtcgttgcgaaggcacgagtcgactcgcgagacgagaccttgtcattaggccttcgcgaggctgtccatgcgacggcatcagagctggcgacgacgggtggcgagtcccggcccgcagagtcgagacgcgccgccgcggagagacgcctgctgctcgaccaggaccctcgactcgtctcgaccgacctagcgcgacgggacgaggtcctacgatgcagctgctcgcatgctgctgtctgtatgcagctcttccagcgaggagagtagtctgagcgagtgcaaggacgaaactgggctcgatcatgaacgctcaatcatgattagcaaagcatcgtagtccgacgctagctccctgagcacgtcggacgatgacgcccgccccgcccgccagcctgagcatctcgcccctcagccctgtcctccctcaccccactctcctctccagcatcggccctttggttgtctctctcgtcgtgcagctcaggtgcctgcctagtgccaccgcttcatcccgaacttccagcgaccgaatctcaggccatcagacccctcggccgttcagccgccctccctgccgccgccgccgaccggcgtccacatccagaccgcgcaccctcccggacccaagcaagcgagtcgctcgtcaacagggcctcgcagcgctaatagctgagcatgagctcctggtcgccgtctaacggcctgcggaacctcgtctcgtcggtgcgtctgtgcctcctcagcccgcgcgagcgagctcaaggcgggccgccgcctgctgctgctgctgctccctccgacagctcgctctcgctccatttagtcagatgagctgacccttgttgcgcctgacctttcactcccgccagctgctcaacaagttcctcgctccttatgtcgagggtctgaacaccgaccagctcaacatctcgctctggtcaggtgcgtcgtcgcccgcttctcctcctcggctccctccgatccgctgccttcatcgccactgctaggcccagcagcgaatagctgataatttgcgccctgctcgcttcgatactctcgctcggcccgctcgcaggcgaggttgtcctccgcaaccttaagatcaagaaggaggcgctcgataagtttcgccttccggtcgatgtcatcgagggtgagttctcttgttcgcctcgccagcaatgagcagggcggtgcagattgtggcgacgctagagggacccgatctctaactttagcttggccctgcccctctccttcgatcgctcatcccgcccggcaggccacctcggaacgctccatctgagcgtgccctactcgagcttggggacaaagcccgtccggatcatcatcgaggacgtctaccttctggccgtcccttctggcgagaccaaggtgcttacgctgctcgagcgttgccttgtggaccgctgctgacctctccctcatcccgcctactctctgcgcgcgcgcagtcggagcccggcgagcaggagaagcgcgaccaagcagccaagcaagagcgcctcgacgcggccgaggcattcgacatcaagagccaggtcgccgatggcgccggcggaagcggcgcggccgatcagaagaagaatgagagcctgatggccggaatgattgcaaacatcatcaacaacctccaggtgacggtccgcaatatccacctccggtacgaggacaagctgagcacgcccgatgtgagtctcccctcttgccctggactcgctacccccgtcgctgatgtcagaccccgcttgcgcccttcagcaccccttcgcggtcggcgtgacgctcgccgagttcgtcgccgtctcgaccgacgagaactggatcgagaccttcatcaacaacacgcagaaggcgctccacaagattgcccgcctgagcagcctcgccctctactttgacacggacgtcggcacgatcgccggcgccgaccgcgaggcgacgctcgccaacttctcggacctcatcacccgcggcggggccgacgacgtccagaagctccaggcccaccaatttatcctcaagccagtctcgggcgaggcccgactcatcatgaaccaccgaatcgacaaggacacgccccaggttgacgcccaggtgctctttgacgagtttggcttcctgatcgacgacgaccagtaccgcgactcgctctcgatggtcgacctcttccacttctacacgcgcacccagcagtatacgcgcttccggccgcccgagagcgagtttaggcacaacccggcccgggcccggctcaagtttgccgccaacgcgatccggagcgagatccacgagaaggaccgcaagtggagctgggcctactttgccgagcgccgcgacgaccgccgggcgtacgtcgacctctacaccaagatgaagctcgcaccagccgggacgtttgtcgggcccgatgcgacgacgctggccgcgctcgaggccaagctgccttacgaggacatccgcttctaccggtcgatcgccaaggccgagctccgcaagaatgccgcctcgcgccgcaagctcgaggaggagaagaaggcggcggccgcggcagcgcagccgcagggctggattggctgggccttcggagcggcaacggccaagaaggctgacgtcgagcaggaggccgagggcgaggctatgaccgagtcagaccggcgcgggctcctctcgctcgtcggctacaatcccgacgccgagcacgcgccaacgcctgacgtcccgcgcgatgcactcaagctccgactctcggccaagctcaagacgggctcgctcgcgctccggcgcgatccgcacggcgcaaagacagacgtgctcgccatcgtctgggatgcgctccaggccgacgccgtcaagtacaccgactcaatggacgcgaccgtcacactcggcggcttccgcgtctacgacggcacgacgcctaactcggtctacccccagattgtccgcgtcaaagacgacgtcgctggcggaggcgtcgggtcggccgccgaccgacgccgagcccaggcccgcgaccagtcggagcaacagcagctcgagatcagccagagctcgagcaacaagaaccccttcttctcgctccggttcgagaacaacccgcttgaccagcgggccgacaatgccgtcaccgtcaagatgcgccatctcgaaatcatctaccacaaggcctatgtcgagaatgtctttcgcttcttcaagccgcccgagagccagctcgagtcgatcaacgccctgatcgacgtcgcgagcgagacgctcgacggcatccgcaaggagacgcgggccgggctcgagtttgcgctccagcagcacaagacggtcgacatcaagctcgacatgaatgcgccgatcattattatcccggaggacgtcgtcgaccccgactgccagcacgtcgtcctcgacgccggccacattgccgtcgagtcaaacctcgtcgcgaaggaggcgctcgccaagatccgggcgaaggaggcccagcagtacaccgacgacgacttcaagaatctcgagaacctgatgtacgaccgcttcacgatccggctcgaggctgctcaggtacgtccatctcgcttttcgcccgactaagactgcgactcctgatgctcggtcgctatcgctcctcagctgctcatgggcccgaagctcgagacgtgcctcaaggcgctcgagtcgcaccagggcgactcggacttccacatcctcgagcgcatcaatctgaccttcagcgcgcagaatgcaatcctgaacgcgcccaacctgacgcgcttcaaagtcgcgggcgacttgcccaatcttcagctcaactttagtgacacgaagtacagtgcgtggctctttattctgacgctcgtcggatgttgcgactgaccagagcgcccgccatcatcctcgtagagacgctcatgcgcttcatcgacgtcacgattcccaagtttgacgacgacgacaacgacgaggcggcgtcaacggcagccccgatcgcccccaaggcgccgacggtcgacccgcctccgcgacacaacagcacgcgcagcggcggcggcttcctcaaccggccggtaatcgaagagtacaacctcgaggaacacgaggacgttgtcgaagacacgccgggcgacgctcctcgtgacgagttctttgacgcgcccgatattgcgtctgacccaagcgagatgcaccagaagacgtttgagttccattttgccgtcgacaaggtccaagcctcgctcttcaagtcgactggctcggccgggcccgagcgccacctcgctgatgccgcgctcgagggctttgcactcgagtttgcactccgcaagtttgaccttggcgtcgacgtctcgctccgatcgatctcgctcgatatgatccggccgggcaagaaggcagtcccgctcgtctcgtcaaacgacgtcaacggccggcagtcgagcaccgacctgatcaaggtccagtacgccaaggtccagaaggactcgcccgagtttcaaacggtctttgagggcgtcgaccagacggtccaggtcgagctttcgacgttcaatgtcctgctcgacccggcgccggtactcgacctctacgactggatcatgacgacgttcgtcccggaagaccgtcccgagcctgcatcggcgtcgacgtcggtcgcaccgacggcaacaatcaccgaggacgccgataccgtcgcggtcactcctccgactgccgatggcgtcaaccaggacaagatccgggtccgcgtcaagatggtcgaatttggaggtgcgcctcgcagctgggtctgctgctgctcggtcgtcggaaggctgaccctcgccgttcccttcttagttctcctgcagcacgatgaccgccggctcgcgacgctttccatgagtgccggagacgtctcgctcctgctgcgagggccgacgatgcgtctcgcggcgacgctcggccacctgtcgatcgtcgacgaccaggcggtcaacgtcaagaacatcctctcgttcgacggcgaggacctgctcgacttcagctatgagacgtttgatccgagcgacccggatccgtgcagctacgacgcaatgctctttctccggaccggttcgctcaagctctactttctcgagcggccgatccgggacctctaccagtggtcgcttctcttcagccgactccaggaggtctacaacactcccgtcatcgagggtaataagggcgacgagactgaggacgtcgacgccggcaacgagagctttgacctgacgccggccgtcattccggcagagccagccaagacgctcgccttccggatcgagatcctcgacccgactatctttatcctcgccgacgatgccgcgcccgactcgcaggcaatcaagctcagcgtcgaacagatcctgatgtcgcagcaggtcggtcctcgcgcctcctcagcttcattcgagcttgctgacgaccccgctctcgcgaccaccagggcatcctcgcactcaacgtccagaagctgggcatgtcgctcctccggatggaccggccgaaagagacgctgcgcttcctcgatgagatcgacatcgtcctctctatggactcccgccaggtctcgtcgcaccagacgaccgacatcgagctcaacgtcgagcccgtcatcttccgcgcctcgtaccgcgatatcctcctcatcaccgagatcgtcaacaagggcattgccatcgctgcctcggcgacgcacgctgaagaggaggtcaagaaggtgaccgacgaggtcaaggcggccgagcctaccacatcgcttgctccacccacatcgcgaccgcgccgcgacacccggacgtcacgagcgtcgacctcgccctcgcgcccgcggcgcctgaccggtacgcgaacggagaagcccaagatccttctgtcgactgagcatgtgaattggccggctgtagcgcttgatgctctcgatcagcctgctgacccaaccaacttcacctctcgcagcttaaagcttccttcgagggtttccagctcgtcctcatcggcgacctacacgagctgccgctgctccacctgcacacgcgccccttcaaggcgaccgtccaggattggtctggcgacgttcgtcctttctgctacccgcgctcaaggcctgacttgtcgagtgagctcgctgacgagcctcttccctggcaccgaccacagatgaagttcatcacggcgctcaagccgtcgatcaagtactacaacctgaccaactcggcttgggagccgttgctcgagccctactcgttcatgctccgcgtgagtcgccagagacaatggcagcttgaccggcggcgcgctgacccttgctcgaacccgaccttcgacaggtctctcgctccgagagcggcggcgacgcaggcaagatggccatcagcttctcgtctgaggagcggctcgagctcaacgttacctcgacgttcatcgagctcgccatcacgagctacacgcaatggacgaaggagagcgaccggattctcaacagcgcccgcggtggcgatgcgccgtacctaatcaaaaaccggaccggctacccgatcgacatctgggccgataagcgcgacgcgcgcggccgccggacgccggtcgccaacggcgaggacatcccctggcggttcgaggactacaagacgattcgcgaacacgtcggcgagtcgatgcaccactcgctcggcctgctcatccacgaggccgactgggagcagctccgcgacatctcggtcgacaaggagggatacttctcgcacgcgcttcggccgaggctcgacaagaacccgcaccggctcatctgcaacatcgagctcataaaaaatgtcaaggtcgtcacgttccgctcgccgctgcgggtcgagaacctgacgcacgtgccggtcgagctcatcatcatcgagaagacgggcaagccgagtccgaccatctacaagattgcgcccggcgaggacttcccgctcccgattgaggccgcctaccacaagcgcttcaagatccggcccgacccgggcttcgacttttcgtggtcgtccgagagcctccactgggaggatctgcgctcgcgaccggtgcgcgcgattgcgtgcaagtcgcacgaagtgcgagaggcgccgttccgcttccaggcctcggcagtcatcgagggcaacgagagcaatgccaagcgttacccgcagctctcgctccgcctgcgggcgccggtcgagatcgagaacctgctgccgtacgacatcaagtaccgcgtcttcgacaagaatacgagcctcaacacgtcgatcttcctccgcaagggtggcatcagcccggtccaccaggtcgagctctcacacctgttgctccttagcgtccaggttcaggacgccggcctcaagccgtctgagtttgccatcatcaacaccgacaatccggacgatttcaacattgaggacacgctcgtcctgacggacctcaaggggctcaagctcaacctcaagatacactacgtgtgcgtctgcgactcgctgtgagcgcgtcggacgcggctcgatgctgacctcgacctgctctgcacagtcgctacccggacccaagcggagcgttcaaggtccaggtctacagcccgtacgtcttcctcaacaagacgggtctgccctgggccgtccggtcaaagacgtggatgggtcagccccgggacgcggccggcagcctcgacctccgtgacgactacctcaaggccgagccgacgccgctcatgttttcgtttgcgagcgacgaccggcgcaacaagtgcctgctcaagtttggcgactcgatgtggtcgaagccgctctccttcgaaacggttgcggccgacatggaggtcgtcaacgaggcgggcgccgggcgccaccaggtccataccggcctctcttatgtcgagggcctcggaaaggtaagccgtcgacaacgcttcgtccaaccgccttccatagctgactgaccgacccctccggctccctctgcagtacaaactgtcgaaggtcgtcacgctcacgccgcggttcctgatcaagaacaacctggccgagacgatcagcgtccggcaggagggcagcgacggcttcatccacctcggcaagggcgaacgcggcccgctgcaccgctttgtcaagcgcggcggcggcaacggcgaggagccgcgggtcgtcattgctctccaaggcttgaacgaagtctggtgcgtccccttctgacaagttgacgacgactctgcacggccggctgatgttcgtccgacggctttcgtctcaggtcggcgccgttcaacattaccgagatcggccgcgtgcacgtcacactgccgcgcaagaacccggcgaccggccagaacaagttgcagctcgttcgagtcgaggtcatcatcgagggaccatccatctttgtccacctcagcgacgagaccgacccttggccgttcaagatccaaaacgagaccgaggaagacttcctcttctgccagacggtgcgtctctccagattcttatggctcttgtgcgctgccgaagctgacgacagcgtctcattcattccgcaccgcaggatgtcaagacggtcgagggcgtcagcgagggcccgcgcaaagcgcggacgatgcacaccgtccagcccttctcatcagccgactactcctgggagctgccggccgaaagcaataagcggctcaagatcatcgccaacggccgcgagcgtctggtcgacgtcatggagatcggcgttctcgctcccttccgcttcaccgacgtatgtccctcgtttgcaggcaacgccctcattcttctaaaaggctgatcaccccttctggcgacccctctcttcagaaagcgggcaacgcccgcatcgcctcgctcgacgttcgcgccgagggtccgtcgcagctgctcgtcatcaccaactacgaggagtcacacagcgcgttcaagccgaccggccgcggcacgctctcgcggacgagcacaatggacagcaacgttgcctttgaggccgtcccgaccgacacgtcggtcaacatgacgatcagcgtcgactttgagggcgtcggcatctcggtcgtcaataagcgcatgcaagagctcgtctacatgtcgttccgcggacttgagctccgctacgtcgacaccgcgacgtcgtactcggcgtcggtcaactgcaagtggatccagattgacaaccagctgttcggcggcatctacccaatcatcttctacccgtcggtcgcacccaaggacggcaaggatctcgactcgcacccgacgcttcaatcgtcggtcatcgtcctcaaggatgagagtgcgtcgcgcttcgcccggggacggtctggcggctacttgctaacgctagccgcacacaacccctcgcgcagcccacggcgtgctctacatcaagtacgcctcgatcctcatccaggccatcacggttgagctcgatgaggactttgcctatgcgctctacgacttttcgcagtttgacggcgcggcctggcaggagcagcccgaagagtacgtacctcgttccgcgagagcaagcttcttgacctgacgtcctcaccttgtaacgactcgcagcgtccttctcgacaacccgggccccatcccggacgcgaagccagacgctggaggaccacctgtctactttgagtcgctggcgctccagccgatgcagctcgagctgtccttcatgcgaaccgagcacgtcaacgtccaggagaagcagtacgtcgcacgtatttcctccagatggcagccgtcaggctcgtgctaacatgctcgctcctttgcaggcggagcactcgcaacccgctcctcttcgtcctcaacgccctgacgatggcgctcggcaacgtcaacgcggcgccggtccggctcaatgcgctcatgatcgagaacgtccggctgtcgatgccggcgctccagagccggatcatgctccactatacgaaccagtttacgtaccagctctaccggatcctcggctcggccgacgcgttcggcaacccggtcggcctctttaccaacgtcagctcgggggtccacgacatcttctacgagccgtatcagggcttcgtcctccacggtaacaaggacctcgcaagcggcatcgcccgtggtgcctcgagcttcgtcaagaagaccgtcttcggcgtatcggacagtatctcgaaggttaccggctcgatcggcaaaggtcagttgtcgcacccacgcagcaagtcgttcgtcgtgctgacccatcccgctccgttcgacaggcatctcggccgcgacgctcgaccctgagtatcaggctaggcgacgcatggctcagcggcgcaacaagccgcggcacgctctctacggccttgccgccggagcccaggctttcggcacgagcgtcgcgagcggcctggagggtctcgcgctcaagccgattgagggcgccgaatctggcggcgccggcggcttcttcaagggcgtcggcaagggtctcgtcggcatcgtcaccaagcccgtcgtcggcgtctttgactttgcgtcgacggcgacgcagggaatccgcaacacgacgacggtcttcgagggcgccgacatcgaccgcatccgcctgcctcgctttactgccgccgacggtgtcctgagggtgagtaacctgtcttcagctaagacagtctcttgagacgacaattgacccgacatgctcctcacagcccttctctggccgcgaggcactcggccagtcgtggctcaaggacctcgagaacggcaagtacttcaacgagacctacgtcgcccatctcggtaaggccgtctgttcgatcatgagagcttaacgagtcgctgacacactcattatttcccaccttcgccagatttcccgaacgacgacaccgtctgcatgctcacgacgacgcgcatcctcctcatccggtcgatcaagctccgcgtcgtttgggaggtcgccttttgggagctccagacaatctcgctcgagccgtcggggatcgccctcctcctccgcgacggcgtccagggcccgttcctgccgctgccagagacgagcagcaggatgtggctctggaagaacctcgagcgggtcctcagggcatacaacgctagccgggcgggcattgacggcggtgcttgagccccgcgtcaaggggtggtagagagagcggggggatcgatctagacacgagttgctacgacccatcgatgaaattttggttctgcctagattggctggccggtctatgtgacgagagagctgtcgccggggcctctgcgcggaacttcgtcgccgcccgccgtttgcccctttcggcccttccaacgtccaccttgactccaccgcccctccttcccgcctgcttccgaccctctcgcctcggcagagcaaggtacgcacgactggatacctccttcagactcgacaccagctgcaccataagagcggatgagcccccggctgctgcgctgggtccagtggctgctcgagctgaccgccccgacctcctcctctcgctgctgcatcttccagactcgtcgcctgccgcggtcgactgtcgtaggacaccaggcgctgctctgtgccgcatgtcgcgccatgcatccttctttgccgccgcccttcaggccgctcaagagtcgcagatgacgcagaagctcggcgctgtcatcgtcaagggcagccggatcatcggccggggcaggaaccagttcatacggtgcgtcttgctcccctcctgttgacagctgagaaggcttcagcacgctcaggtggaagttggacaagcatgactgatggctcgtgcacctgttccaacctgcaggccagggggtttcgggttggacgtcggcggtagcagttcgagctctgacggcctgctgacgaccgaccaccggccggcagccgtcccgcacctctcgctgcacgccgagcaggctgccatccggtcgtgcctccactacaacgcccggcagtcgctcgcctcacttgacaagtactttctgcccgtctcagcctcgtcgtcggtgccgacgttccactcgcgccctccgccgccgaggggccgccggcgcgagtacgaggcgcccgaggacgtctgcaagggcacgtccctctacgtcggccgatggaactcgggcgccgggctcggcatgacggcaaagccttgctggcgctgcgtccagacgatgcacgactttggcgtccggactgtgctctggaccgtaacgccgccgccgaccctcccgccacggatcatccccggccctctcgacccggcgctcttccacgaccggtcgctctcggccttgcccggaccggaacaatactacctgagtgaggacggcgagtgctttgccgaggccaaggtggccgacctctggaggacggtccaagaggcaagcgaccttgaatcgagcggcttcatgacactcgccgaggagtcggccatcaaggagcagcgcaaacgcttggcctggcaggagggagcgaggagaggctcgcaggaaggcggcatatcatgaggtcttccctctgacattcgttgtcgccgcctcctactggccagcagctgactcgcgcgtaggaagaggggggaaccatccagagtcgcacgaggcctcgttcgagaaggtcggcggcaccgtcttcgccaaatgcctgcggcttggatcgagagattagatcttctttcgctccgagttccgatcgagctcgcgctcgagggcaaggatagcgggagccgccgccgccgccactccgataggacttcggcgatagcgttcgagcacgaactgaagcaagagctcgcgctcgcggacctctcgaccgacgccgcacctcctcagctggccgagtatcgcgtcgacctccttgatgatgcccttggcgtcgagccggcgctcgaaggcggccgaaaggagctgctccgcgatgtcgagtgttggcttcaggccgaggtcgaagagtcgacggaccgtcgtctggcgcaggcccgacacgaacgtcggcaaggagatgtagcgctcgaggaagagcccgagcagggcctgctgctcctggaagtcgtctgggtccgcggtagcctcgtcaaccggcgagactgaggcaagctcggcgtcgagcgtgccgagtttgaccaggtcggcgagcgcgttgccgtcgaacgacgagttgacagccttggcgtcgacaagcgcacgtaggatctgccaatcgtcgtcggtgacgccgtggaccgacggcaggtcagagtgggcgatcgcatgcaatgcctgcgacaggcggcgcttgcggccggcgcgcaggctcgggcgcgagaactggccgaggagcgacggccggctgcgttctggactggcaggcgtctcctggagggccaaggacgagtcactgggcaaccagagcgagggcgacatgtgcggcgggagattgacatcggcggagggacgtcggtcggccggcggtcggggaggcgacgctcgaggttgccggtagcgttccagctcgaggcccatcgttctcgcgtgcagcacgtgagcttgagcgttgagtcgctgctcgcgctcggtctttcttgaccgctccgtcgaccatgggtttggaccgtcaacgagccgggcgacctcgccgctcagatgccagagctgggtgcagtcggcttgcgccgaggtcgtggcaacggcgttggccgccgttgcgagcgccagggcttgatcgctggcccgggagcggggggtggccagagaggaagacccgagcgaagagtagaggatccgttccgttttagcagcgaccggtctagacatgtcgttgagcaggatgaggggttgcgcggtggttgaggaagagagcaagcggaggcgcagccgaccaccgcctccaaaccgccggcgccggcggttgagtacagtacacactgcgtcaccctcactttatgaagattcgtgcatttttccatcagaagattgagcgctgagctatctgagtgatcttccaaagagcggcgcgactgcgttcgctgtagagcccgctggcggtcaggtgcaagcgaggcgtctttactcgtcagacaaacgccttttcctgctcttactccgtcattccggggcttgcaattcgtcaagcagagagacccttacaaccagttctgctgtgcgtgtaaaggtaagtctgctggtcccgaagttgcttgctgcacagtcgacttggcacaccgcccacgccggtcgaacgacaaggtcaagcaaaacatgatacaggaaacgagcacgagcgagaggcctcagtgatcgctagacggacgagaggaacatctttaggggccgggagagtgctaaagacggggcggcacgcttgcaagctcgggcggagcgctcagcggctctgggagacaaactgccaggcgtcgtcgaagttctcgaagcggcgcaggcggttgcttgaataacctagcgtctcgcgcgcagcgtcggccctggtggagggtagggaataaagggacagagaagtcagttgacgttgacaagggacgtcatctggtgagagaggggaaaggacgcaccaggaggtgtagatcccccagggtccgaccgcaggcgacggcgtagaaggtgccgtataagaacgggtagacgacggcgtcatagtactggattgcatcttcggggtcttgggctgcagagcgggcaagagcgacaggcgttagagaagtgatctcgtgtgggttcccctcctgtctcgcagcaaggtcgacgcgtttgagggcgacgagcagtaaggacggaccatagtcttcgaggaagtcctcggcctcctcacgcgagtagatcttcttgtagacggcggacgagaagccggcgacctctcgctcgcagtcgaaattgctcgagagcgaggcgacgcgcgcaacaagtggggcgtcgagcgcgggtcagctcgcagagatggccgtcgtgcgcgggagggaggcagacggatcacttgcggtagatcctgggaagtagccgttggtgacggcgtaccatccgggtcgggcgcggttgtgcttggagggcggtcgagcgacggcagatgggcagcggcgagcagcggtgtcaggggtcaagcggggcggaaggctacccgacgagctcgcggcctcgagcgcatctatgagctctcagtaccggtagaggactcacatgatgctggctgaacaggtctctgaggtcgggctggctgggcgtcggtcgtggttggcaggcaggacgacgaccgacaagctctcgagacaaaaggaaaggccgactgcgcgcgcagagagacctttcgcacgcgacggcgcgagatgaaaggggcctgtctgtctgtccgtcctcccaccctttcaacatccagcttctcaaggggcagcacagaacagtctagagcaaagcaggcttgcaatctcgttgtacagaggttggagatacgaggggcggggggagaggcgccgcaggattactcggaggcggccatgactgcagagggcgagagcagagaagggtcagcccgaaccggacgcaaaacgggcgagacgggaggcgcgtcaagactaactagcgttgatgaggtcgccgttggcctccttgagcaggcggacagccttgtcgtggtcgcacgaggcctgggccatgaggatctcgacgtccttctcgtcaatctcggcatcagacgcctggggcgcggtcttgggcgtcttgtcggtgacgaggttctggagctccgggatcctggtagcgtgtaaaagagaggtgtaggtcagcgagagggccaggaaaggacgaagcgggctatgagaaagacgcactcgtcgccctcctcctcctcgccgaggccgctggcggcagcgagctgctgagcggtggccatctgagcctgctgggactggtcctcgacctgaaggcaagcagaagttgggtcagcaagagcgcgcgtcggaaccatggtcgtctgcggcgctagaccgaccttggcctcgccaaagacgatgtggacgtccgaggtaggcgacttgtagacgtcggggttcgagacgacgaagagcatctagtgaagggccaaggcgacgtcagcaagcaggccttctcgagagatgagtgagggacggggagggaccgacgttcttaggccggcggacggtcacgcgagtgatgccggcaaccttcttgaggccgaggttggcgagggcctggcgggccttgcgctcagagcgcgactggcaagcgaaagcacggcgtccggagcaagagggaaggtcagcaaaggctggtcgggcgggagggagtagcgtcgtctttgaggcgaaggccaaaggagatgatggcttttcgcgcgccaacgggcctcaggcgggcgacctcgcttccgagcgaccatcgcaagcggcaaggcgcggctgagcatgctcgaggccgaacagatgacctgctcgacctcgacttgcaccttgcggggtatctgtgatcggccgaggtcgagcgagccggagttcgactcgtcgcctgcagagggcgagacggagcagagagagggacgcacgatgaccttctcaaggtcggcgtccgaggcgacgagctggggggcgtcctcgtggtcggacagggagagctcctcgatgctggccattgttgctagttgaaagaagagagagagagagtagagtgagaaggagaggttgggctgacaggttgggtcggagggagcaagcagcaggcccgcccgcgagagaagcccagcgcgagattttaaactccgcctgcgcaaccccctgttggccgagctccctgcgctgctgccgctcctcccgaacttccatccaccagagactcttcagccagcctttagtcgtacgttccttgccgttgagacctctcagactggcagtctgctcacccatctctgctctgccctcctctctcgcgcgcgcagcatcttcaccatgtcgtgagtctctcctcttactcaagccatcgcgcaggaggccgctccaagtctttcttgcggttgaggcgagatgggaatccgtcctcatctcgccgacctctcctgctcgtcttgcttgcgagggccaacactgatctgatcgtgaaaatctcctcgccgctacttcagcaacgtctacgtgcgtttccctcgtctctctctcgcagcagacccgtcgctctgctgcagatcgttcctcgagcttccctcgcaagccggcggctgattctttttttctttttctttcgacgccgtcaccgctccgtccgacctgcagttcgacatctccagttcgcatgcctttaaattcgccacaacctggacgcagcatgctgacccgtctcgctttcctatagtcaacggctcgcccgccggccgcatcgagttcaagctctacgacgacgtcgttcccaagacggcccgtaacttccgcgagctctgcaccggccagaacggctttggctacgccggctcgggcttccaccgcatcatcccccagttcatgctccagggcggtgacttcaccaaccacaacggaactggcggaaagtcgatctacggcgccaagttcgccgacgagaacgtgggtcctctagtcttctcccgggttgcgtaccggcaggatcctcattgcccctttttctctccctctctcctccttcagttcaccctcaagcacaccaagccgggactcctctcgatggccaacgctggccccaacaccaacggctcgcagttcttcgtcaccagtgcgtcgccgctgaccttctgcatgtgcagagaaagactgagactgactttgttccactcgatcttcctccagccgtcaagaccagctggctcgacggcaagcactgcgtcttcggagaggtcaccaagggcctcgacctcgtctcgaagattgagtcgtacggcagtgacaggttcgtcgattttccgaagctccgatgtcgagaaatcatatcggaggaacggtcattgactctcatttgccttctccctaacagcggcaagccgaaggctaaggtcgagatcaccgccgccggtacctgctaatcgttcgttgctcgcagcgtacgcttcgcaatttctgacccggctactgtagctgtaaagcaaaaggagggatgacggcacttgtgagatcgcatggccaagacttttcctttgatcatcgctacagccagcatggagtactcaggccgcttgaacctaagagcaccatcatcagagatctgctgcctatacatacaattgtgagagggaagggcatgtcggcggctgtttcgactgctcaccggccggcgtccgcgcagaagcccaccgtgcgccgaagaagggagagtgcgactggaagagagctggccaagcgctgtagtgtcgactcatcgagcttgcgacgtttttgcgacgcttggctggatgagtcgacttgcaggtggaaaagggtagatccgctcagcggccgctgcgccctgctgaatttcgttcgaccttgctcgccttacgccgctgaccagacaagccggcgaggcaagccctcggcttttctcgtcaggtcggcgtgtccggcggcgtcctgggtgcgagtccgagcggtgcctgcccgtctgtccctttggcaaaagtgcaagcagctggtcagcaggcggacgacgtgcagcggccgtcgctgcggggccgccgaccctccgcattcccgccccgaatgaccgaccgacgccctcgcccgtttcaaccgccacaccgcagcggacaccacggcccgggaccggaccctggctcgaggcccctctctgctcgctgaccggggcgagggcctgctgcaaggctgatctttttggcccccttgcttgctgcctccgacgaccgcgagctgccctgtccctccctttgcctgacgcctcaagacccaagcagccgtagacctcgtcaagtccgagtccttagagccgcagcacttcccaccagaccatgatcccgcactcagcagcagccgctagcccgacctcgacgcgggagccgtcgctctcgacggtcgtcgccgagcgcgacaccgagaagctcgccggcggcggcgccgacctcgaccgggtcgaggttgctgtcgacgggcctgcgggaccggcgccgcctggaacaggacctcgtggtccgcgtgagaaggtgcgttgccgacagagagagacgagcgctcggcctagtcaacctaccgtgcgcgcagggctgaaccgtcctttacctcctgttaacccatagggcgcagccgtctccatcgccgaagccgccgagggcgtcgacgacgtctttgtcaagaaggagggcgggcctgactaccgagccgtcggctggattggcgccctcgtcctcctgctcaagacgcagattggccttggcgtgctcgccctcccgaacgcgttgatgacgctcggcgtcgtcgtacgtccgacttggcgaccgtacatcttgacctgccagccgctgaccttctctcttgcagcccggcctcctcgtcctggtcgggctcggccttctgacgacgtacagcgacttcagtgcgtcctgcgctgcacgtgcgcgctctgcgcttgcggcctctctctgacacccgctcccctgaacctcgcccagtcctcggcgaattccgcacgcagttccctggcatccactcggtcggcgacgtcggctttgtcatgggcggcgtctggggcagggagctcatcggctggtcgtacgtctagttcttgaagagaaggcaagcgaacgtctccctaaccttgcgccgacgtcttctccagctacttcctgttcatgaccttcctgacttcctcgggagtccttgcaacgtcgtacgtccgccggttgggctctcgccggattgggcgcagattcactcagagctaatcaccctcttcaccttcgcaggatcgccctcaacgccatcactgagcacgctacgtgcactgtcgtacgtcccctacccttcaggcctgaaaaccttgcttgtctgacggttggctgttctctgcaggtctgggcggtcgtcgcggccatcattatcggcatcggcgcctcggccaggacgttcaagcagatctcgtggctcggctggttcggcatctcgttccttctgcgtgcgtcgcaagaacctgcttctccctcctcctcgacacaagctgacattcggtcgcacgctcctctcagccgccgtcttcaccgtcgtcatcgccgtcggtgtcagcgaccggccgcctgccgccccgcctggcatgccggttgataagcagctccgggcgttcaacaacccgtccttcaccgacgccatggtcgccgtcgtcaacatcctctttgcctactgcggcacgccgggcttcttctcggtcatcgcagagatgaaggtgcgtcggctacgagacggtggcttgctccagcggcaactgactcgcgctttcctcgccgcagaaccctcgccactacaaccgggccatgtttgcctgccaggcattctccatcgcgttctacacgaccgtcgctgtcgtcctctggtactgtcagtcggcttccttttggcgtgtcgacgggctgttgcgagagacgctgacgcgcaccaaccttcctcccagactgcggccgctacgtcgcctcgcccgcgctcggctcggccgggccgctcatcaagaagattgcttacggcattgccctaccaggcctaatcgctgggcccgtcgtctactctcgtgcgtacctcagcctccaatgcctgctaagagccgagactgacgtcgattcctcctccgacgacagacctcgccatcaagttctgcttcgtccgtctgctccgcggcacagttcatctccaggagtcaaccaagacgcactggatcgcgtggatttcgatcgtcactggcgtcgtctcgctcgccttcatcatcgcccaggtcatccctttcttcgaccaggtgcgtgcccgtctctctctctcgcttgactgcgatcgtccaggccatgtcgactgaccgcgtgccgcccttactcgcagttgatcggactgatcggagccatcttcgctggtttcttttgtctcactctatgtggtagtatgtggatcttcgcgaacgactacaaggtgcgtccttctccctgagtcctcgtctgcactgtgctgaccctcgcttttctgtctcgaccgcagcggaaggaaggcaagacgaccgtcggctacaagctcaactatgcgctcgcctgcttcatgatcctcgccggcctcttcatcctcgtagccggcttctacgcctcagtcgtctcgatcaaggacgcattcgcgacgggcgaggtcggctcgcccttctcgtgcgtcgacaactcgggcagcacggtcgtccaggcttagacctttctttctcttcacttgctgtttgcttgcacgaatcctcccctcccttgctcctgtccgcgccttcgtcgcaccaattcccctcccccttatctgcaggggttgtagcttctagatgtatcgcagcgccaagccgcgcacagtgtcactccccgcggcggatggtccgttccttactcgcacgtacgacgccttcgggctgcgggacgcgtttaatttctaccgccactgacggagcccccggccgccgctgctgcggattctggccggcggcgcgcgcgccttgtccaccctcctgtcagcccttcttctctcgccacccagcacgacgacgacgacgaagacagcccggacaagatcaacgcctgtatcccttcacgctcgctctctcagctcccgctctcgcgcccgcaggtccagcaggctctcgacctcccgcctcgcgaaaacacggccggccttccctccgacgtcagcccagcagcaacgcgcgacacctcttaagcacgcgcctcctcctgccaccttccctcctcctctccggccatgctcgcgaccacgctcgccaccctggctctcgccgtcgcgcctcagctggcgcaggctctccggcctgacgtcgactcggccaacggcggctgggaccagctccgaatcgtcaacaagcgctggcagctgcacacgacgctcgcctcgccgacgaacgccgccgacgccgccgcgacctcgttgtcggctgcacctgatggggtcacctcagtgatgtcggtcgcgcctgccgccatcgagacgtactcgtcggcacctctgaacagcccgccgccgccggccgatctgccagacgccatgacggtgcgcgtttgggaaagcgccgacgcgcacgtcgccgccggcaaccggctcagcgtccgccagccaagtaacttccttggttactcgatcgagctctcggtcgcgaaccaggtttgtgagtatgacattcctctcaggcaggccgcctcgcgagttccgtcggcgctttcgagccagacagccgctgacgtcccctgtcatccctttgtcgcgtgctccagtgggtccgagctcgattgagcttcgcgcgccgttcctcaactacctccagaatctgcgtgctcgcacgcagtcgggcgcccgtgtccgcatcggcggcaactctcaggagggcagcgtcatgtacccgaccggcgagctccccaatggcggcaacggagggtgcgcacctggttcgactggggggccgtctcgaacgactgtactgacagacgactcctgaactctagctccttcctcgagaaggccgagtcgacggcgaccatcaccaacacgcccgacgtcctctacactgaggatctcatctacgcgatgagcaacacgactgcgctcgtcaacacgcagtgggtcttcggcgccgccttcatcaacggtaccgttgacggctgggacaacccgctccgcgttgtcgactttgtcgaggagcaccttggcgacaacctaatcggcatccaactttcgaacgagcctgatctgtgcgtcatgccctgcgcctcgctgacgtttcgctcccaggaactgacgtcgctcgcacaggtaccccggccggcggcgagacgagtcctacaccaaggaaatctggttccaggaggtcggcgagtttctctccaacgagctcgagaaggagcccgacctgccgcagctcaataacttcttcctgccaaacttctgctgcaagtaagtcctagactgtcgcccggcccatccttctctcgcggtcgactgacccttccgtccgtttgaagttggtttcccttcgaggcgatggacatgcagctcatcgagacgtatggcgaccggatgaacaccctctcgtaccagcagtcagttgccccggacgttgctggctcctcgaaccaaggcgtcgtgctgacgctcgactctcttggcagctacccttacaacaactgcggtgacaaggacccgtcctacccacaggaggtcttccaggacttcctcaaccacacgctcgcgctgtcgctcaccgagccgtacacggccgcgctcaaccaggcgatcgaggctggcctccagacgacgatgctcgagaccaacacggcgtcctgctcaggcctggccggcctcagcgactcgtttggtggcgcgctgtggacgcttgactggtcgctcacccaggcggccatcaactttacgagctcgtacatgcacgtcggaggtcgcgacgcccactacaacgtgagcagcccttgaccgactgtgcgttcttcagagccctcgctaacgccgccctcgacatcctagcccttcaccgccgtccagacaaaccagtcgacgttccgcggctggacgaccggccccgtctactacacgtcgctgatcgcggccgagatctttggctcggccaacgcctcgcagatctctgacatcacggtgaggctttgccattatcgggtcgagtcgattgcgttgctgatacctttcgcttctccgatcggctccacagcccgagggcagcatcttcaaccccacctacgtcgtctacgaggacaacgtgccgaccaaggttgccctcttcaactatgtcacggacccgaccggtggcagcaacgtcaatgttgccctcagcgtcggcggcatcaccgaaggcacggcagcgacgacgccgagccaagtctttgtccgctactgggcggcgccatcagcgggcgagcagtttgccgtgcgttccgacctcgactgttgcgccgcctgggagctgacctgctattgcactcgtagatgacctgggccggccaatccgctggagccggcggcccttggacctcagatggcacgctcaagggcgagcagcagacggtgaccgttgactgcccaggcggcacgtgctcgatcccgctcaacgcgccctcgttcgcgctcgtcttcctctcgcaggcggccctcgatgccgtcggcggcactgtcgaagccatcgtcgatggagtcgaccagatggcgacaaccttcgggacaacatacaacgctggtggcgtcggcactgcgacgggtgcgtcgacccacctcttctggtttcaactgcctgcaatgactgaccctgccacccctttgcgctacagttcctcaaggcgtgctcgagacgtccaacggccgcgtcactggcggccacatcctcggcagcacgtccaagggcaaccaggacgaggagtcgaccgcctcgcgccggacggctctgggtggtctcgtcgcatcggtcgctggcgctctcgccgtcgccggctttttcctcacctcctaattttccgcccggacgcccctagatcactgctttgcccggcccaaccttgcatcgaccctcacgcccctctgtactctgtcacccagcatgcgctgcacgccagtgcgctttgcccatcctttgcatcttcacgacccacgcattctgcgcgcatacttatcgatgcctgtgccatcaaacgtccttcgaccgacttgcggtgagagagcctgccagctgtcggacctctgtgcgcctccctctctaggcgtcgtcgggtgatcacatatatagaggcggccgcggcgtcgagccgggtgcaggcaggggcagagatgggtacgagcggtcaagccagacgtctcgcttagatagcgctgcaggtcgagtaggtgccgaacttggtttcgaggccggcgtaaggcccggtatgggcctgagtaaagagtgactcggcgacggggtcgttggtcgagcagtacgaggcggtccaggtgaactggctggccttgccgccgcaggccggaaggatcgtcaggtgctcggtccacgatgcgagcttggcgttgaacgcgacagcgtcgaccgggagcgtgcccgcagtcttgccaccgacacccttccacaggcggtcgaagtaaagcggcgacaggttgctggagcggatggaacagaagaatcagtcttgagaacgactgtcgaggatcggacggcggctacgcacacgttcgaaatgagcttctcggtcaggtcgacagcgccgccgaacgagaacgagcgggtcgcgcccgggaggttgtccttgccggtcgtcgaggcaatggtgaagccctcccactcggcgtcaaagaagctgtcgataatgggcgagattgctagaaagggaaggcctccggcgtcagcgacggcttaggctgcgagagggaggccggcaaacgcactcttcaggctggcagggatagtgcgcttgtccgtgacggacccgtaagtgtacccggtcgggcacttgagcgtgccagtggcgccggcgacgatcgtgtcgaggatagatcggtcctcaaccgagaccgcagggctggcggcgacgagaggggccgcaagggcgatggagacaagggcgagaggagcgacgagcatcttgggcagggaggagaaaaagaaagacggctggaagaggagaggaagtttgatggtggcaagaacgacagtcgccgtccgtcgtctccttcttatactcctcagcgaccaagcagcctgcctcgaagtcagcttgtgcgacgccggtggatttagttaggtccctcagcgtgggcgcgggccggaagggggcaaaggccggacgcacacgctcgagcggtgccttctcccgcggacgagatcgtcggccgtcctggttgccggagttctggatgagcgccagccttgataagccggcggcggaggctgcttcaacgcgacgccagccttcgggcccgcagaattcgaggcgtgtctcagcgcgatttcggcgtttcgactcccgccgggcgtcacggccgtctgccgtcgtcgttttcgagccgacgcagagcgtgggttgagcgagccgcgaacgagagcgagacgcgtcgagacgtcgcgtcgaatgtcgctgactgcgagacacgacgaccaggggcaaacgagtaggacgacgagcgacatgaggatgagccggctgcaggcgaacgagacagcttcgatagaaaggaactctcgacgaacgctgcagctggctcgttctggtggctggagtccaaatcccataacaaccggcgagcgtttgggactggccgtctacatcagctgaggcacatcacgacgccgagagtcaggttaatgccgagcgcgatcatgatcgccatctgcatcttgcgcctgcggtcggttagggtatgagtcaacgtcttcgaattggcggggaggtgtgttgaaaacgcacgagaagacggctcctccggtggtgtcaagctctcgaccagggcctaggaaggagtgcggttcggcgtctttgaagaagaagagcgtgaggagcgggaagaagaaggagatcgttaggccgttaaggagcgtgctgtaagtcgaagcgggctcggcgtcggctgcgagagagagatggtcaggatcggcgcatgggataggctgagtcctgcgcaccattggccgtcgttagcgtcccatcgatccaagactcctctagcgtttgagccgcctcgtccactgcgcacgacgcacaaggaggagacgtaagggttagcagaagagcataggcgggactttaacgatcgcaagcagtcaacgtacgttcgacgtcgacgtcccgcgtgcgatgaaactgccggcgcatcgtccgcacatcgtcctcagagaggccggccgttgctcgaagcaagtcaaagccgcgcagaggcaccgtgctgtcgatctggcagcgtagatgagaaagaagacttcagtcttggcgtcgactggctgaacggagcgagagcagcgactcaccgcttccgagcgctctgtctcctcttcgccctcgccgagctccaagccgacggcgcactgcaaccatacgacgtcctcgacgtgatcctcgtcggccttgctggcaccgaccgcagcaggcggatcgagggcgcgagcgcgatcccgctgctgcgtaaggtaggggacgagcgtgagggtcggtgagaggacccggccgaggtaaatgagccgcaggttgcgacgagctagggccggacgactggtacggatctgcatcaggggttgggctcaatatgtcaggcggcggtcggcttacgagtgcaaaccacgcgggacgcaccttccatttgaggtcggcgatgctgtcagcctcttccgcccagagctcgaggtcgcccgaactccgctcgccgtcgccttccgctccggctccagtctggacgtcggccgccgtggcgacgatgccgccctcgagaaagcggaccgtcacctggcggcccttctgccgctcaggccgaggggggtcctcgcgcccgagcgagcgatcgcgctgcttgcccttggctttggcggactgaaccgggccagacagagactggcgtttgggaaaggtaggcaggccggcagtgctcgaagtaggagagctctcgaggctcgtgcttccacgaggctgctgttctgcgctcgtgttgaagcggccgaccggaggcggagactgcgcagggttggccgccggagcgtgcgagatgggcaggaggggcgtcgcaggcatcggtaccgacttgaccggccctgatctaatcgagagcggccgagcgggatgagatcgccgagtgctgatgctgaagctggcttttgagatggcgagggtaagggcaagagtcaacggtcagtggacttgagccggagccgccgtggcctttcgcgtcaggaccgaccagcaacgctcacccgacggcccatggccagccctcatctccagcagcagcacgagagcctcgcgccagcccatgatagacgagggctctttggcggcctaagtagcagcggcagcaacgccggcagcagcgggctcgcctcggcgtccctggtgcctcttccgcctgctgtgcacgtccggtcgtcctactcgttcacgactggcatcatcatcggccaagcctccgtcttcctcctgctctttctcgtcgtccgctacgtcgtatttgaggatggtaaagccggcatgaagcgccgggctgagcgagctcgagctgctggcgtcagacaggtgcgcatcaaggtcgcctgcgacaggtcgcctttcgagcgagtgtgctgacgagccctcgacgacgctcgcagcgccgaccatcgcaccttgcccggctctcgtcggcaccaccgccaccgatcacgtcggcccagctgctatcaaaggccggctacgacctgtcgtcgcacccgccggagtcgatggactggctcaacgtgctgtttgcgcaagtgcgtagtcggctgcgggccgaccctccgccagtcacggacctgctgactcggaccctgctgctaccctctccaggtggtgagcaactaccgcgcaagcctgctcgctcacaagggcgaagagggcgcgcgccagatggttgaggagtggctcaacccggcccagggcgtctcatggctggtgcgctgctcgtactcatggctcgcacgcgctcgttcgctgacgcctaacgcactcgccgacactccaggatccgatcagggtaacggctctcacgctcggatcatcctatcctctcttttcgaatgcgcggatccgaccttcggacgcttccggccgtttcgtgagttggcaccgtgcgctcgctccaggtgtattcgaagctgaccttccgccgttggttatgttcagcgcgctgagaccgagctcgagtattccgactcggtcacgcttaccatctcgaccggcctcgtcatcaactttccccggccgcgctttgcagtcctgccgatcagccttggcgtgacgttcgtcggcctgcacggcacggtgcgtcgcccactcatcaagctcctcgccgaggctccggctgacgagcgtctccctgcacacggttccagatgacggtcgagctcctctcctcgccaacgtcggccgactcgccgacgccgcaccagtcgctccggctctccctccaccccgactttgagctcgcgctttcgacgacgtcgctcctcggatcgcgcgccaagctccaggacctgcctaagattgagcagctcgtttcgagccggctgcgccaggcgctcgtcgaccgcgtcgtctggccgtgcttctgggcgttcggcctgcccggcttgggaaggggcgtctcgaagcaggcgggcgcagcagcgccggatggcccgccggacgagtacgccgtcgacgacgaccctggcgcgggcatcgtccctcctccgtcagcggcaacagcggcgtcggcagcagctccagcgacaccgacggctgccgctgcgctgaggcagcggaggccagccgagccgatccgccgggagactgggctcggcggcggcatgcggatgatgcccggtggcagcgactggggcgtcggcggcatgtgagcgagcggtcgacgcgtctggctttatctgcatgctttcggaaacacagctgccttctcgacgacctgcccttccgctctcagtccgcgcgccacgcccggctggccgcaagaagtatggcctcggctcgctgctcttttgacagacgctagcctccaccgtctgtgcccctctgctgcttcaaccgtccgcccctccaccacccggcactcgccccgcgcgagccgtcgtgcccttcctccctcccgcgagtcggtcggtgctgccgtgagtcaaacaaggcatcgtcatccctcggcacgcgtgccttaggcccaggtggccgggcggttggcggcgaagacaccccgggcgcgggtgatcttgtggggaagggggaacttgaggccggggacaagaagctgcctggaggtgacaagacgggtgggcagggtcagctcccgggcctcctcgagcacaagcagcatcagacggccgacgcacttgatgtaagggcgcttgatgtcggcggtcttctcaatctcgacgacccgcaggatgtggatcgatctgaagcgggcgcggtggcgggcggccatgtcctggtagagggcctcgacggcgtcgacgcgcgagagctcgcggtactccttgtacatgttgtgcgtgcccgagcgcgagtcgtaccggatccagacgccaaagttcttgaccttgagcggcttggcctccgagatgacgttgacggcgacaatctcgcccgacgccttcttaaccttggtggtctggcggaggaagtaccagaagcgcgacttggcaacaacctcgttgggggcaaagatccgcatgcggaagagctgagaccgaggggcgcaaggcgaggggtcagcgctcctgaacggagtggccgagcgccaggggccgacccgacgacgacaaggacgacaaacgcaccttgggcgcgggctcagcctcggtgggcagcttgcggccaaggacctggtactcgatgaaacgtcccatctgagcgcgagaggtgaggtagggtgaggtggtccgtggtcagcgggctgaggtttcggcgccgactttaggacggccggccggccggcagcagctggcagcggagagcagcagctcgcagctcacgagaggaggcggcgacagcaacggctggcgacccctcctcttgctcgctcccggacacggacgaagaggacaggcaaggtcggaccggtcccctctcgttacgcgtgtgctgctgccgctgccttgggccgggccttcctgtcgagcatgggctgactcactttgcttgatgatctcgacggaggtagggagcagcagcgacagcaacgagcccgaacagcagcggcacgcggaggcctctctgcggtcgcgggccgtgagcgcggggggctggctgtgggaacctcaagcaaaaaccccggtgactgggcgtcccgcggcggctgaccctgaacaacggccccgactctggacgagccgatttcatgcgccgtgggatgtcaaaggatcccacgctcgagcccccagccgcccgctccgccgccgcgctgcagcaagctcgacgaccggtcggacttactcttgccctcgccgtcagtcctgtgagtgagaagagaggccgcaagtaacgagagaagtcaacagcgctgacattcttgcccgcctcatccatacctgctcgccgccgtttgcgccgtcccaatcgaccggtcccttccctttcgacctgtgctcgcctgtccgcgtgctgcttcctccttgctgcgacctcgcctgcccgcgcgccgcctcccaccgaacctctcgctcggacccttctctccctccaacagtctcaagatcacctttcgcccaacatggagcaagtcgagaaagcctaccagaagcagcacctcttccagaacaccaaggccaagggtgcgtcaatctccttcgcgcgtcgggtcgagctcggctcgggacgaccgagctcgcgcttgggacgctgggaaggacatggcactgacgcttcacgctttgactctgctccttcttccctggccgtcctttggtcgccctcgacgctctccgtactcgtgctctctcgactgctcgtgctgccgttgtcctccgaactgtcctcggctcgtcccgctcgcctccttcgtgtgcgcctgcaccctttcccccccactcgcaggcctgaagaaggttgcggccaagtcccagcgctggtacaaggacgtcggactcggcttcaagacccccgccgaggccatcaacggcacctacatcggtacgtccggccaccaagctcggatggactgggctgctgctgctactgctgttgggctgggtagggggtgagggcaggcctcgaatggaagaggagggggaaggggcgtcggagagggatgacacgtctgggcttgcggcacgactggaggccaggcgtcgcgctcgtcgtccttggcagatcgagccgaccccaggcctttgggagcggtcctcgcccggcgggtccgccagaagcagcagcagaccggccgcttagtcgacttcccaccaagccagccatctgacctctcattctcttgctcgctcttcgcagacaagaagtgcccgttcacgggtgatgtctcgatccgtggccgcatcctgaccggcaaggtcatctcggccggcaagatgacccgcaccatcatcatccgccgcgactacctcgtgcgtccgaatcttggtttagcaagccacgcgacctgagcgctgacccttaccaacgccctgctctgctccagcacttcatcccgaagtactcgcggtacgagaagcgccaccgcaacctcgccgcccactgctcgcccgcgttccgcgtcgaggtcggagacaacgtcactgtcggccagtgccgccctctctccaagacggtccgcttcaacgtcgtccgggtcgccaaggtgcgtccagttgcgaaaagtcggcggcggtcgatcaaattcagcggctgacattgaacaccttgtcctccttttgcagaaccgggctgctgccaaggccttcagcaaatttgcgagttcactcagctgacatctgctgctgcaacgtgccccccgctgacaccttgaccatcttgcttgtccgctacagtaaatgcatctggcgcgagtgatgcatgatttgagacctcccgaaccatgcgcctgcctgagagcttgcgtcgttttcgtcgttcttgctaaaggccctgaatgccttatcaagcgcgctaccaaggaagtcgccgccgcgcttggcgtgcctcgttccctgcgcaggggaacgaggagggtcagacgccgattggtcgaggccttttctcggtcagccagccagcacgagctggacgatcattgctcgtgcttcggccctcctcttccccgaccgcctggttgactgactcccgacacaccagccgccgatcgccagcgtccacatgtcccgcgcgggcctcagcgttccacgagtcgctccgacctgagcatgagcgctcctgctgatttactgaatgggcatgagagagcctgctcgcccgccttacgtcgccatcgcgacgtcgccagtggcgccacccgttccagcgccgacgtcgaccgtcgagtccttcgtgccaccgaggccaaggtccttcagcagaccatcgacctcgggccccgagaagatgcgggcgaccggcttctgcgtctcctggttgagagtgagcgtcgccagctcgactgtgaccagcaccgacgtgagcacactcggtcagcggcaggcacaaaacgagaggacgggcacaagaagcaaggacgcacgcttctcggacccgagcttggtcgtgtccatcgtctttgacatgaccttgaggcacagctcggtggcctccttgaccgtcatcgtctccttgtagtcctgcttcagcagactcgtcgcactgaagtcgagaccagtaaagcgaggcgtcaacgctgagcgcgcgaggcccggccgttccgcatcactcacgtgccgttgttggcgccgatcgccgtcgccttccagccagagtagttgccgctcgggtcgctctgatacagctggaacttgtagagctcgtcgtagccgacatacaggagcgagacgccgaacggccgaaggccaccgtgctgcgtgtagccctgcttgaggtcacacagcttctggacgagcgcctcaaccggaatgtcgtcattgtagttgagcagatggttctgagcggccgtgcgcgcatagttgatgagtgatgtcgcgtcggccgtgtagcccgcgatgccggtcaaagtgttgctgcgaggatcggaaagcagagggaaggcatggccagggcagcgcgcgatagcggtgacgattggagtcgagacgaggagggatgggtgagcttgtcagcaagctgaagttgcagccggccgtcttcgcaaggagggccacgcacttgttcaagagaaagattttctctccaccggccgcccaagcctcaccgccctcaccgcccttggtgaggccgaggtcgagcagcttggacgtaaccttcttctcagcagcgaggacgacgccgtccgaggcaaggatcgcgagcaccgagccggcgtgcgagatggcctccatggcatactcgactagagtaggcacaagaggtagatgagatatgaaagtcagcttaccgcccagcagtgggactgcaggcagggaatcgagacgactgactctggtagagccgacctggttgcgcatcggaggacgtggagcttgatcagcactgagctcatcttgcgccgccacagcgagctgcacagccgacggagacggaatcctagctaggcgcgtaccttccggggagaagatcgtcgtcctgcctgggaggttgcgggagagggcatggcagggtcggtcagctcaccatctctcgcgcgcgcaggagggcccaggtcgaggtcggatgggaggcagctcactgtcgtaccggcgagcctgcgagaagaggtcatcgtgtcagctggagcattcgcgagcctgctagctcagcttggactgaccatgatgtctaggagaaatagagagagtgggagtgggcggtgttgggtggtcgtggaggggtgagctgcttcgccgcaacgacgacgccgctggagccgccgccgcgcaagggccagcacgtcgtcgaccccttgaccagcatcttctcaagccaagcctttccttacagtccctggccactgctcgcccgttaagtccctgccatgtcctcacaaccctcggcgtcctcatcgccggcctggaagacgacgctctcggtgacggtcccggcggccgcgacccttccgccgcccggacacctgccgctgtcgagctcgacgacgcaccccttgccgccgccaaagcaggccgcgccggtcgctctgccgtcggacccgctcagctccaaggccgaggtcaaggcgatggccgagccaacgtcgctctacggcccgctactcgaggtcatgggcaaagtccgcgaggagatcaacggcgttctgaccggctggaaggagtgggaagacaacgcgctcggcggcgtcgtcgcccggcagtccaagcgggcaaagaagagcggcacttcggccgacgacgaagacgaggacgaggacgatgagcaagaggactaaggccaatgctggatgcacggccgatgatcgactgcgcctgagcaagactatccgccgtcaccgtcgccgctcctttcctccccgcttttctgagcgctgcgctcagggtctacccagggctggagctggaagagcatgagcgggacgacacccgcttctctggacgcacgcacgaatgccccagacataggcctctcggcaatgcaccctgcctctctcagacgctcgccttgaccgtcttgagagacctccctcgatcaatcggatgcgaggcactagcatgatacagtttactgtccgcccaatcacttggaatagcgggggggagctgtgagagcgagaggggaggctgtcggggtcagcgccgctccgcttctcgtcgcaccacacccgagcaaaccggcacaggcgcgaccgagcccacgtacgcgtctgcttgccctcgggcgaggcacccatgacgtcagcgctcgagccagccgacgggacggcattcttgggcttgggctttgtgacgatgatgagctgcggcgcgaggagcaacagcacggcggcggacgagcgtaaggtcagccatcgaggcgtgcaggcccagcagcaacctcatgcgacgcacggcggtcgaagcgagcgcgccagcaccgagctgatcgcgatgtcgggcagagcgagaagccggacaagaggtcagcagggccggcggcgcaggctgcaggcgaggccgaggaggacgcacaatccaagcgccgtacttggtatagaagctccgggtgtcgacctgggcgtacgaccgccggccgaccttggcggcggctggcgactggcgcagcaaggcacgggcggtagcaggggcaaacatcgtgaaggtgtaagaggtcaagaggcgagcgagatggtggtcgtcggctcccccagccccgggcgagcgagcctctttcgcgccctgcggagcggcggcggccggacgagcgtgccggcagatgacgagtctgctttcgatgcaacctaggacctctcaagcacgactctccagaatgttgcgaaggagattttgatttgcattcagctcatatacgtgccgagaccgctcagccgataggagagcactttggaggggcgtgagggaggagggagggagacgagaaggcgagagacacaggaggcgaggaggccggttgcagggaggtggtacagccgctcgcgctggagagaggcaaggcagggttggaagcaagcgtgatgcgagggagaatggagaaggagagggcggcgtgggggtgaccgaagaacaggcgggtattaagggacaagcagggcgtgttctaggccgaagccgggccgggaggccgcgcaacgagggcgagtagcggcagacgggacgaggcggctagtcgactatgagactggcgcagacgacttggcagctcagcgacaggccggctgatcggggaaggacggagcgcgtcactcaccactcatgggctcgacgccggtcgtcttctccagtgcccgggcggcaaagactgcaaagcggaaagagaggggtcgtcaggcgggactcgacaagcgacgagtgccttcgatcagctacgcacatcggacgtccgggtcgctgtcgccggccaacttctccagcgcgggcacgaccttgcgcgcagcaagctcctggccctcggcgtctgtcgacgcggtgacggcaattgtctcgagcgccttggcgacgttaaaacggatgttggggatcggatccgacacgaggttgagcgccgtgtcgaggactgagtcacgaatggtcgcgaggtcgagcaccggcgtgatggtctgcaagagggacggaggcggtcagcgacctggcgggggcacaagagcgtcctcttcgcacgggtcgcagacgcaccgagatggcaaggatcgtcgtcatccggtagagatagttagggtgcgagcccatcgcgagcacttgcgggatgatggtccggccggcccactcgacgccaaagacctcggtcagcttcttgaggttgatggtcgcgctctcgcggatgctgaagacgttgtcgccgagccagctcatgcagaggttgccgagcttatcgtcaaagaactggacgccgagctgggttgcgagcagcggaatgtactcgatgatggcctgccgcacgcgccactgcttgtcctcggcgaggtcgataatcgccggcaggagcgactgcgagagcaggtcgatgccgatgacgtcgttgacgagctcgagcttgccgatcagctggagccggacgtcgctctggtcgtccttcagcagcttgaggaaaaggggcaggaggtgctcgatggtcgcctccttgccaagtagcggggccaggccgctaatctgcgcgccgagggccgccttgacatgcggcgaggcgtcggcagcgaggtcgcggacacagggcagcaggcgagcgaggacaacctcgcggtcgagcagcgtggcaaagcctggggtgtgggaaatcatagaccgaaacagtcagcaagcagcccaggccgatgcaaactttgcgaagccacgacgcaccaggaatctgcgaagcggcagccgtccggacctcggcctcgttgtccttgagcaggctgacaaacgcctgaatcatctcttcccgacggatatcctcgccgaccgccttagcaagctgcagaatagcaccccgtaaggcacaaggtcagcaagctgtacgcctcgagcggaggtccttgagagcaagcatcacgaaccgcgacaaactcgttgccgaccatgtagcgcacccgccagctcttgtcggtgaaggcagagcggagcgtcggcagcaggtattcgccgacctcttccgggctcatctgctcggcgatcgcgatcagggccgggaccgtcaggagccggaccgagtcctggtcgtccgacgagagcttgcggtagagcgggatgacgtccgagaggagcagtgcgtgcgagctcgtgaagcacttggcgtagggcttaatgagggtgtgcgggagtgcagaggggtcggtcagctcgctggtctgaggcgcaggctgacggcagcacggtcgtaacgcacgccgaggttcttagcagccgcccggcgaaccatcggcgtgtcgtcgccgcccaggccggcgaacaggcgccgcatctcctccttgccggcgtcggtcgcgttcgggtagacgggcgcaaggagagcgcaggctgaggtgcgcgacgtaaaccagtcgccggtcgagagccgcttgagcagcggcaggtagtgctcggtcagttgcgacggcgagagctggaccgcgatcttcgtcagagagtcggaggcctggcagaggagaaagagcgatggccgagggaagtcggtcagccggggatgcgacgaccggcagcttcaacgacgtggctcggccgcaccttctcgcggacgagcgtctcctcgacggcggctaggttctcgagcgggccgaggacgaggtgggcgtactcgcgtccgccgacgaactctccaaactctccaagctcctcggccagcgcgagcaggatctcatcctcgtcgtcgagctggtcctggaggaaggggatgagctcctcccgcgtccgctgcgggccgagggcgagcgcgatcgttgagagccggcggatcgaggtcaagcgaagcgagacgtcgtccgacttgagctcatctgggaggcggacagacaagcaagcggggtgggcaggcgtcgcatcagcgacagctcgctgcaactcgggccaaaccagacgacagacggaccgatgaggatggcgatagggaagatgtcggtcatggtggaggtcgagcccaagctgagaaggatgaaaggagccgatacaagcgcgctggaggacgacgagcgaggtcgacagaacgcggcaggagcaggtcggttgcggcggaacagagatcggagggcggtcgagatgagatgcgacgagagcggggtaggactgtcagagctgagctccaaaggccagcagcagtagctggagcagacagacggcctttgtacgcacgtctggctgaagctgagggttgaggcgcagagtcgacgggcggacggatggagatggtcgggcgaggttgttgagcgcgaggtcggcggcggcgggtcaaaagttggagcacgagggcgtggtaggttggtcggcgggtggcgggacgaggctgcggcgcgtcagtcgagcgatgctggaggcatgcgaaagctcgagagatcggggagcgagaacggaccgggaacgggcaagggcgtgtgattctgagtgagaagaagggagggagggagggggagggcgaggcgtgcttgtcgagcctcgttcgcgagagcgcgcgcgcgcgtgagccagccagcagggcccgtgggcgcgccgcctcgagctttcaggtatcgattcaaatagggcccaagcggccttttcgcctgcctgccgctcgagttcctccgaaatgacgtctactgaacatcttgcccctcactgcgctcaccagccgctccttgatgcgacctgtccagcccgtctgagcccgaccgtctgctcacttacgagtcggacggcctccagcgggaggccgatcgacacgaaccgatcgacctcgacctgccgagcaacgacgaagactttggcttggaggatgacgccgccgacacctcgtccgacgcctcctcaacctcaaccgagacggccttgagcttggagagtagcgcaagcagcgcatggttggcatctccggctaaaaagaaaacctcgtacgttttcggcaccagacgcgcagcacaaagtgctgccgcggctggcgcagaggacacggataagtagagaggtatcagcaactttggttgcttcgtgataaagattcgatgagcgcgcaaccgccgaaggatagggtgacggctcctggagggtgcccacaagccggcagctatgggatgatcgcaggttagcctcgcctttgaatgagggggtgtgagagcgccggaagcacatttccttaagtcggcgcggagtgcggcgaaatggggcatgatccggcgcgtgacgccgttgccgcaagccgcgtcgatgccgctctccttggcgatcgcgattaactcgagcaaagctatccgccaggcctggccaatgacggcagctctctgcaagaggcgaaggccgcacgtctcgagctgcaaagacgaggcgcaagcagccgttaatcagctcaggacgcagcgagcagtgcaggagaagagcgcacctcgggatgaagggcaaagatagaaggtcgccctcgttttcgagtcggcgccgacgggcggccgcaggcaggttgctcagtcagaacgaggcttggtaggttttgtctcagcgaaccggcagatgttggtttcatctgagaagactatcactatcagcggctttacgctagcgggcagcgagctttggaaggaccgagcggaggatgaaagcttggtgagcctgggcgcggtcaggagccgagagcggacgccaagaccgaatttggatgtcccaagcgtcctctccagaataaaaccagcttgttgggctcccagccctaccaaagagaggcggcggtatcagccgatcggcggcggacgccaggcagtagagacgcttctaccttgcggttgcgggactatttgttctgggccaagcagcggacgtatagcggacagcgagagcgcggatcatctggcaaggacgatagccaacaatagttagacggcttcaaacgtgaaggaggggcggcgaacacccaccttgccctagcggaggtcggccgcggcaaactggttgcgggcctcacgctgctgaagagggagcgtcgtggcggcgtgaattggcgggcggttgcccggcgccggcgcgccgcgaacatgcagcatcatcattcctaagaaatctgagacccctgcgtaaaccttccgccaaccaaaatccctcgaggatatttcgccggtggaaggttcaagctcctcctacaccttacttaagcctcacgtctgattcacaacccttcctctctcttccacgcctttccgtatctcgcgacagagaccatgagatcaagtcaaaagttcacccgaccgtctttacctcccgtaatgaacgcgaccctcaacacgatcaatgtcagcgacgagcgttcgcctgactgtcctttgatcctagccggcgacggaccggaccgcccgcagatcatctacccgctcacaaagaagcagtgcgaccagagagggtcggtcaagtcattcagcatcctcgctcgggtaagggtaagagctcgaatctgggcagtacaagaatgggattaagctgctggctatgccttcctaacttcaagcggtcgacctttctcaccgatcatctgagtactgacgctacgctttcttgcaaatcggtcgctgccatcacgtcgagtcgcaaggcttcagtctattttgcgattgccctatcgatgtcactaccgctgttgctgtccctgctcaaccagcaaccgagacagcacatgcttgcctgcaacagatgcttcctgagatggagctgtaagagcgtgtgacggctgtcaaagtgtgaaggatttgcacggaaggaagatgcttgcaagaaactgtaagcggctgggcgtataggccaccacactgttgaaggaagagcgtcgtggtagttttgcgggagggtcgccagcgccggcgcgctgcagcgcccgcccgcgcggcggcgccggaagttaggggtacgcttcatcgaacgtaacacgctttacctccctccgtaacatcactctcttgcccttacggcttcctccctcatagcacttttaaaggcgcaagtcctcatgtatcttaagcgtcattcgactgccttgtcccctgcaaggccgtgtcgttcaacacacaccacttatctgggtatggttttagtcgcgtaaaatgaaaacattgagactcaaatctgcgctggaagacagctgttatcacggcctagagctgcgccgtagaaaagggcgccaccaggcgcagagagctcgttgtcgccttgtacgtgcggcgccaactttcggacggtctcttcgataaggtagtcctcctgcgctgcgggtgtcttcccgagtcacttaacagacggcgttgacaaaagggaaatgtgctgggcagaggtcaggtcggcgctacaggatcaagcaagcccctcggagctggcacgctaccctcgacgggcgcctgcggtcggtcgatcggcctcaaaccgacggatgcgtgtacgtccgcagccgacttggagagaaggtcagactcgatgtggtcttgatctaggttgacaacctgtttgtagcaggcacggccgagacggtcgacggggttcgagcggatctcgaatcgacctggcagatgatcgaccgagggggcctgagggccgtacctcggcgtcgaggtcaagagcgacaggagcaagaggacgatccgactcacccagtcaaggtacgctctcaaggcgctcgaccttctggccacgtcagccggctcggtcggattgatctcaacgccggttgacgggccgccggtcgagaaggctgcgagcaggacgacaagcgagaagagttagtacttgtcggcgatcgatcgcctgcggtagctagtcttgagctgttgaaggaagagcgtcgtggtagttttgcgggagggtcgccagcgccggcgcgctgcagcgcccgcccgcgcggcggcgccggaagttagggttacgcttcatcgaacgtaacacgctttacctccctccgtaacatcactctcttgcccttacggcttcctccctcatagcaattttcaaggcgcaagtcctcatgtatcttaagcgttcacccgactgccttgtcccctgcaaggccgtgtcgttcaacagattaagagtctgatcccttcaccccccttcctcacgatggccgacgccctgctcaacctcgtcccggacgcccctccgtcctcgacgcagctttaccagaagctcgacgacacttcgctcgccaagtttgaccgcctcccttcgcccctctcggcctccgtcaactacggcgtctgggagcgccgcctccagtctgccctcaagggcatgaggctctgggacctcgtcaccggccgccgagctcgtccggccgctggccacccgctcgcccaagccgcctgggacgccgacgatgaagccgccatcgagtttatcattgccaagctcgacgacaccgaggtcgagcgcgtctggaagtgcacaacggccaagcagcacctcgaagcgctccgggcggcccacctcatcgagggcacggccggcgagatgcagctgctcgagcagctgctcggtatgcgcatggttcaggggaccgacgtccgcgagcagattgatgcctttctcaccaaaatcaacgccatccgccggatcggcggggagctcaaggacctcgacctcctctttgggtacctgctcctgcgcacgctgccagctacgcccgcggccgaaatgctcaagtcatccattcggacccaagtcggcaaggacgccgtcggccagcccctgcccctcaccctcagctacgtcgctaagtccctcatcgaggacgcccagctcctggctgcgacgaccaaccggctcaccgccgctgacggaccaatcgagacccactcggctctcgccctcacgccctcggccacgactgcctgcttcatctgcggcggccccggccacttcgccctcaattgccccgaccgggccaagttcggcttcaaggacggcggcgccggccgggcgaagtccaagaggtactgcgagtaccacaagaccatcagccacaatacgactgacttgtttgggtaggtggaggaaagcaggtgatggtcgggagggaaggcgagatgaggaacggccgccgcccttcttgaaggccagcgaggcagcagcagcagcggcgggacggcatgacgcagagggtagtagctgcgcgccccggggacgcccttgccgtcacgccccgcacgctcggactcctctccctgtcggccggaccttgacgccctgcaggaggatgtctgtagaggcaagacgcttctagatcctcagatgatattagcaggagacggcagcaagagcgcagctcgtcagaggacggctcgagaggtcagcgcgtttgcgagtgacgccacccgtcgtcgggctacaggcacctgtcgaacccccctttctacagcacgaaagcgctgattttcgtcaaagctcgtcaggatagtcgctccctcttgagctcgcatctcctcccgctgccgcgctcgagccacgtctgacgctgccagtcgagcaggacgcgcaccatgccgccgagcccaaattcgggccagaaggtgtcgacaaagtagatgcgtgtgttcggagcgctctgagaaggacgaagacccggtcagccgaaggatcgccgacaagtagcgacggctgaagtgcacctggtaaagcagaaagtctgagagccgcttgacgccggaggtccggatgaggagatcgagtggtgggctgccgcccttcgtcgtgtaaaggttctcgtacagcacctcgtccgtgatattcctaaaaggagccaatcgcaacggtgtgggtcagtttcggcaatgtccagcgacgacgggcggagaagacggacccggcgttcagcgtgccagcctgaacggcggcggtcgtcgtccgaatggcggtcgccatctcctcgcgcgacgtgtagggcatacagacgttgagaatggctctatccggcagtcacccctgggtcagtatcgacgagcagaggccacaccagcgcacgatcgcactttgaattatgccgggtgaggacctccatctcctcgacgctcgcgcggacgtcggctcggaggaggtcggtccgaccgatgatgttgaccctgacctcgtacctgtcgagcagctccctttcggacgtaaggagcgacaggcgatcagcgactcggtcatctcatgccagcgcacgccaggcaacgacgcaccctttggaagcgagctcgcgcagccgaccgcgggcaaggtccatgagcgcgtcgacctcatcgcccgggcgcgagaagttttcgatcgagaaggcatagaccgagacgcaggaaatgtcgagccgcatgcagagctcgaggacctgctcgagagtggtcggccagacgggcgtcggagggcagcaggcatgagcttcccttcctcatgcgcgcgcaagtgcgccgctgggccaaggcgaagtcgcagcctcgtcgacgtaccctcttcaaactgtcgaagccctcgagatggccgtcaaagacgggccggcctcggagtctggcaaagcgtctgttgccgtccatgacgaaggcgcagtgcttcgggacaggtcccgcacgaaggatagcgagcacgagccggacggcgagcgcgccgagccaagcgagcgccggcgagagcagcgggatgggcatacggccgggcggatggcggtgggctcgaagtcgcaggcttggccgaagagtatccaaggggccttctcggcagcaagctcctgctacagagaacagatggaggcgcgagggagggatgcggtcgaagggctgaagccgtccctccgaatcagcctgccaaaggggctgcggcgaccaaagcccccggcttcgccctaacgaccactctctcgacccctcttgcagccactctcaagacacgcagaacgcgcgcttctgcgagctcgatactcctcgtaccagccttcaagctcgagccgtcctgctcacccctccggatctggcagccgccacctccctccgaccatggcgtcgacctctaccctactgccgagccgcttcatccctcggctcaagttccactttccgaacaaggtccaccactggcatccaggccacatgaagggcttcatggaccggatggcgtttgaagtggccgacattgacctcatcatcgagtgccgcgacgcccggctgccgctgacgagcatcaacccaaggctcgaggaggtcgtcgaccaggcttggggactgggctggcgcaatggcaacgggaccgagcgaggccggcgccggaatcggctcgtcgtctacacgaagagcgaccttgccgaggagcggttcgaggaggtgcgtcatcaggagctttaagctgctggaccggagcgcaggagctgaccttgtcggccggacctgcgcagccgctgaaagcagccttcctcaagtacgccgaccagaaggtgctcttcgccaagacgtcggattcgatcgacgtcaagaagatcctgaagcactgcgtcggtacgtcggccgtcctttggcgtcaagctgcatgtcagcgctcgaactgacctgctgctattgcgctcccgcttgcagccttcgcaaagaagcacgagacgacaatcctcgacatgaagattctcgtcgtcggcatgcccaatgtcggaaagtcgtcgctgctgaacggcctccgccataccggtatgaagaagggtctgtctgcgcgtggattgacggcacttgctccagctgagcagcccactgacgtttgacgaacaacccccttgcaggcaaggtcttccggacaggcaacatggccggcgtcacccgaaagtttacgggctcggccaagatctgcgagaacccgcgcatctatgtctacgacgcgccgggcgtgctcgtcccttggttcggcgacgacgaggaggcagcggaccgcgcaatgatggtcgcagtgacgagtgcgtggcctgctcgctctccccttgaacgtctcgtcgcgagactgacacctcaccgccgctctcccaggcggcatccacgacagtctcgtcaacgacgagatggtcgccgactatctgctctaccggctgaatctgcgcgcggcggagtcggacagcttgccgatgggccacttggagcgaggtctgtctggcctgggtcgatcgtcctccctcgcgttgcagcccgctgacctcaattcctcgcacgccagtcattccttaccactatggcctgccctactcggaggagcttcacaagtcgacgaacgacatcaatgcgttcctcgcggccgtcgcgcggcggataggcgcgctgggtcggggcggctttgccgacattgaccgcgcggccgccttcttcctcaaccactttcgcaaaggcaagctcggccgctacacgctcgacgacctcgagcagaaaggcgacatctatgccgacccggccttttcgttctaccctgacgaggccgagcttgggtcggaaggcggcggcggcgggagcgagacgcgcgagatgattgcccagcgcaagcatctcgacatcctcctcccgcagccgaaggccaagcacgtcgcgctcgtcgaggacctcggcctgccgcgatcgttcgacccagagaacccgccttgggccgagccgtatgccgactcgctcgcgcacctcaacatgacgcgctacgcgccgccgatcaaggcgccgtccgacgtctgggagaaggtcgacgaggccgtccggcgctactactttggcaaggaggccaaggagggcctcctcagtcagacgcagcagaagaagctcgcgatggccgagcgcaaggccggcatctacgctcagaagaagtcgaagctgctcgagcgacagcgccagctcggtctcgctcagcggccgggcgtcgtccagcggatccaggcgacctgatggccatgataaccgttcaccaaagcaagcccaagcgggtagagggccagtgctgttgaccatccgggcgggctgacctgtgcttccgacaccgcgcagagggtcggagttgccaggctcgcccttgcaagctgcgcatgcgtcaccgccgtcgtcgcccattcgtctcgtcttcctttcgtcgccaccatctcctgccttttcgccaccgaccaccacccgactcaacaaccaccttcgacccacagcacactctccgcacagcatggccctccgcaacacgctccgcccgttcctgacggccctcgagccctcgttccgccaggcgacgaccccgtcgtcgctcgtccccgccggctcatccctctttggcggcccggccggtgccctctggcagcagccggcctcgcttttcaacgagctcttccacaacggccccgtcggcgccttcccggccgtcagcgtcgaggagaagcagggcggctacgagagtgcgtctaccgcaatgccctctgcgccagtcacgaactgacccctcaggctccgtctcattctccttgctcgactcctcatccgaccgcagtcaccgctgacgtgcccggcctcaagaaggacgagatccgcgtccgcctcgccgacgcgaaccaccggctcatcctcgaaggcgagaccaagtcgtgggagaaggccgaggagcccgcctcggccgccgacgccaccgccaccatcaaggacgacgctgccggttcgactgccgcttctgacggcggaggcgatgctcagggtgcgtgcaagcgctcgctcaatcgcgacgcatacacctgccctcgactaccgcagctgacctgccgctcacccccctcctctccgccatcgttgtgcttcatgcagctccgcttggcgagaccagctcgacccaggccgtcacccaccggcagagcgactcgcccgcactgctcatcaacgagcgctcgacctactctgccttccgccgggcctttgccttccacgagccactcgacccggcttcgatcaaggcccggctcgagcacggccagctccgggtaagcgtccagaagaaggaccagcccgagggcgagggcgtcgtcgagatccaggtcgagtgacgaggtcaaccttcgtcgacccagccgtcctttggcgtcgccggtctgttttcggccctctcgctcgcaacatcgcgtccgatctttgtatttctctcgtccgtctcggccttcatgggccctttccgatttctcctatgtacctttttcatcagctgatggtcagcgattgttgccgacgacgtggctctcgcgatgagtacgccgtctgcggagacacgccggcgcgagtgcctgagcccacaggcagcgctgagacaacccccgaggctcttgccgctcactcatggaagcttggctgggtcacgagcgcttgaatagagcgaccagacttgttggtaagctctatccagatgagatgagaagcgctgctgtaacgaccatcactcggccggccgctcttcgcgccgctgcgcctgcgagtgcgccctcccgaccgacgaccgaccacgaccgcctctcctccctccagcctgcccaggatgacctcgtccgacgtccgctcgatcctcaatctaccagcgtcggcttcccagctgtcgcaccctcggccggcggcagctgccccgccggcgaaacggcacaggccagagggcgtctcgcgcgaggtctttgccctcctcggcgaccacgtcccgtcggtccaggcggccgcgctggaggcggcggcggcggccggcagcagcctcaagttcaaggagaaggcccggatgggcaagaaggcgaagccagctgagaagtggtccgtttgcattgctcggaactggatggaggggagccggcttgagctgaccgccgccttcgccgacgctgctcttccgaccgaccgcagggtgagccgtaagttcaggccggccggccgcgaatcgcgcgagggcttccacgactcgctcgagctctcgcattggagcaaagtgtcagcttcgacggatcccaaaggtgcgtgggtcagctcggatcagcgcgagctggaccgaaggctgacgcttaagctcgttgcgctgttcagacgacccattcgtcaagtacacgcagcccagcccgacgcccgtctacgagttttcgcagcacgaatacgatcaacacctgacggatcccgactggacggcacacgagacgcagtacctctttgggctgctcaagagctttgactgccggttcgtcatcgttgccgatcgctacgcgtacccgggcgagcgcggcgagtacgtcgccaagctaggaggcgcgagcagcggcggcggcgagtcttcagcttcaggggccgctgctggaggaggctcgtcgacgtcgtcgtccgtctcgagcaagggcaaggagaaggcgtctgagccgccggccgggtccggcgctagctgggctggacaaggcggcaagcgtcggtcgatcgaggacatcaagagccgctactattcggtttgccgtcggctcgtccgcagccgaccgacgggcgacgagattggcaagacgcagatgctccagtactacgcgttcgacaagggtgcgtcgacgcctggcgcttgtctctgggttgctgccggctgctgacctggatcttccaaccctttagagcgcgagctagcacggaaagcctacgccgcctccctcttctcgctcacgccggctcagatcgccgaggaagaggcgctctacctcgagtgcaagcggatggagcagcaggagcggacattccgggccgagcgggacgagctcatgaagtcgctcggcggggcggcaaccgtcgtcatggcgcaaatcgtcaacagctccaacaacgccgacaagaagcgcaaggagtctgccgtcgagagtgccgtcgtcgggctgaacggcttgaccggcaacaagaagctcgacaaggcgactaaagcaggtaattacgccgttggcttgacgctcagactggcacccgtctgacgcttgctccggtccatctgcagacctccttcactgcatctaccgcccgcccctgccaccgatcgcctctgggcctggcacgtcatccctcaagggcgttcagacgctgcttaacaatcccgttcatctccgctcgcagcgcccgccggccgtgccacccaagccgtccgaggaggtcgtcgctggcatcatcgcctcccttcggccggaggtccctttgccaggcaagctcgtcatgccgacccgaggcaatctcgacaagatggagggcctcatgcttgccgccggcgggctcggcgagatgaaggctgccgtcgacaagtgcgaacacgaggcgcgcgtcctgcgcgagcggctcgagctccgcaagcggatgaaggccagcggcgcgtcgacagcggcgacgagtcgccgaacgacgccagtaccggcggctgacgttggcatcgaggcctcctcggctgttcccgccgcagagggaggaaaggcgatgagcggcgtcgagccgtcgccagcccagtgatatgcttgcatgccgactttctttctccgatccgtacttctaggacgagcttgtacgaggggaaggatcgtgtaaggaccgaggcagcaagccggtcccggtcatcagcgacgcaagcgggtcgagtaagctctggcgaccagaaaggggcggcgggccagcggaagcggcgcgtgcgcacaggcaggccggtcgagctcgccctgacgtcgaccttgccttgccttgccctgccttccagccgcacagagcaagccccgcccagcccttactcaagagtcgatctcaagctgctagctcgtccttccagctccagcgccatgtactcgacccttcagcgggcgaacaacacgctctcgctcgcggtcaccgtcctcttcggcttgctcgcggccatctcgatctcgtccttcgtcctcctgccgtcgtcggtccccgggtccagcctgtcggtcgagccgctcaacatgtacgtcctagctgccgggtgctacaagccgctgtgaatctcggccgagccgacgctgaccgcgccctcctgtcgcctccgttcgcccagcgtgctcggcaagaacaagtaccagcggaacgcccgcgagcaggagtacgcgttcgctcgcttcgacgtcgatgccggtgcgtccattcagctacttgagcgtactacctttgctgatcgcagacgatctcccacggcagacctcgcacccctctttcactggaacaccaagcagctcttccttcagctgacggccgagtacaagacgccgggctcggtgcgtctcttcccatgccgctcattctcgacccggctcaaaactgatggccgaccctgtcgcagacgccaaactctgtcgtcctctgggacaagattgttcgctcgcccaagcagggccggctcgcgctcaagagcgtccgcaacaagtacccgttcaaagaagtctccaactcgttccggtgcgtccctcgtgcctgtcgcacgtccgagcgcgcatctgccgtagctgacctcctgcattgccctcgcagcgacgtcaccaacgtcagctacagcctgtcgtaccacgtcatgccttacgtcggtgtcctccagtcgggcgagatcgcgcggacgagcaaggtcctcgagcgcctgcccaagcccaaggccaacgtatgagatgggcgcatttcatttcgctggcctcgagagagctgaccgcggctagtctttgtagcgggctgatggcgggctgacaagcgatatgctgacgacaagccgggcgaacttcatcaagagaagggcagttgaaggtgagggtatgtccaggtagcagccgaaggtcgaggtgaggaccagggtggcggtcgagcagctcagacgatggtctacgttcctaaaggacgaaggctgccaatccgaggccgacggcagcccctacaccggcaagcttgccggctcctccgaagcgagcgtcagcacccgaggcaggtcgggccgaggccgaggcagacgcagcggccgcccgagcagaggacgagcgcgaggcggccgacgaggaggctgatgcagcggccggcttggtcgatgaggtagacgccagtgctgagacggaggaggcagcgctgacagcccgcgaggggacggaggcggcgacagctcgagtcgaggagacggcgttggacgagaccgcggcaaggctggtcagagcagaggcaaggcaggcgagttgtcaacgatgaccattggctatcgttcgaaagagcccctcacctcgaaactggctcggccatgctggatgagatcatgccgtcgaacgaggattcgtcgccctcgacctcgtccggcaaacccgtctcggtagagcccggcgcctcagactcgatcgtggtggggtcttcagtgcgggatggctgggcctcttcctcctgccgaacgtgcatggcaacacggccagaacgcgccatcgggagaggggcgagggcgcctgcaagaaggacgcagcaatcagtgattggtccgggtaataatcaagggatgcgcaagactgacctctatgggcggccgtcgccgggacggaagagaggaagaggctcgctccgagggcgaggagggaagcgacggaggtggatttcatggtggtagagttggggatgcaaggctggtgagggtaaagagatgcagaagggaagcaggtctcgtcggcgcccttcctttatgcgactcgaagcatgcgacacagcctgcacagcgcccggtcattgacggcagcagcaacagattcgtgactgccgtgatgcgtccctgtcgaggacttgtcaccgtgcgggccggtgcagaggtgatcgggctggtcgctcgacttgcgtgacaggatgcagccccccccgccagtcaccgctcgatctctcgatagcctcggtgacccaatgggtctgtcgtcgtaatgctcaggtagcttacggtctgtaagtagatgctcagcccatcgaggtattagcggcggtcgagcagggcactgcggaggcaatagttgaaacgtctgtcaaggtgaccaccgtttcttgcggcgtcgagcacggccagtatcagttctcaattgcgaccttatcgatcgtcaccgagtcaagggttagggtattggaactaaggcgaggggaagggctcgtcgttgacgtgttcgctgaagactgttcgccgactgctctggcttatgagatctctggctcgggcagcgaggtcaaatcgaacgaaaaggtcattattcagcgggccaggggtcttgaaaaggtctacaggggaggtgattgaaggagtgttgagctcgcgcattattctgggaggagggagggatcggacgaggtcaggtggctcgaaaggggttacagagtggcggagcgtcggcgtggcggcatcagaggcctggagagcggatgaaagcagtcgcgctgcgtttgagagtaagctcagggaggtccagtcagagaacgatagccgccaggccgaagccgatcgcaaagctgatggcgacccggccgagtccgccagcagcagcgaaccgctcgtcggcggccgagccctgactggcgaccttggcagaagcgctcgcgcccgctgacgacgcggcgaccttgacggacgaggcgctcgcgccggcggacgagacggcacttttggcggacgaggcggccgaggcgacagcggagacggcggtcgagacggcgccggcggccttggaggtaatcgactcgagcgcagggttcgtgacgagcgacgagaggacgacgccggcggctgaggtcgcgctgcgaatgagggtacacggcgagactggttagcagcaacacgcgagcgccggagagaatcagacgggaggacttacctggcaacggcctcgctgaagtcggtaacggcgccctcaaggaggctcgaggccgacgcctcgaggctgaaggcctcgctctcgacggccgcgccgggcgcctcgggctcggcaggagtcggcggcggcggctcctggcgaacggcgagtgcgagggtaggtgaccgagccaggacgggcgccgggaagtgcgcgagagctgtgagggcgaaagcaggagcgtggcgtctcgtcggtcaacagctgggagaggagggcgggccagtgtgtgggatgggaagggaaggcagtgtgacggaccagctgggacggcagcgaccgggacgagcgagagaagcaggccggccgagagagcgagcattgaggcgagcgatgtggtcttcatggttggcgagggcgagggcgagctgggacggacgaggaagacgggaaggtgagatgcggtgaggagagagacggcctccctcgggtttcgctccctcttgtagccggccgctagctttgggggcccagcatctgacaccaagattagctcgtgcgcgaccgacgtcgcgatctggcaggcgcgccttctgtggcgggttgcaagagaggcacccgtggctgagcggtagtcgcgtcctctggcggcgcggagccagtgcggagagacaggagggcaggcgcgctgcagctggtgctgtggacggaaccggctgcctctcgagccaggccgtctgatcaatgcaagtcagtccgagcagctccctccgcgggtttgagcaggtaagaaagtcagcagtcgacgcagtcgaaggtgtcatcggcagaatggggtcgagtgacgacgggcgtgccttgcgcaccgcgcgccgcatgctggagtccggcggactctcgagcggcccaccccgccccgcctagcagttcaagcctgcggcccgccttcgctcgcccctgctcaccaacgcccactcctccgcccaccctgctctcccggcttgcctctttcggaaacgccctctggatcgattcgctgctgcctgctttcgtctgcgccgaaaacgtcgtcgtcgtcgtccgcgttcctccgggttcctctgagctcgaaaccgacgggagctcgtctgcctctgcacccgcccgccttctccctttcaccgctcgcctcgtagccatcctcacctccccttctctctctccgtccaaagcgacccgtcgcttggctaggaggagacctcgaccgaggacccccctgaatagaaccgttgcctgcccctctctcggagcctgcttcttcctgctcgccgtctctcgccaccgctacggttgaacgagatctctctcctcttttccgcctgcctcacccctctgacgagacgatggcctacaaccacggctactactcggcgccaacgccggttgctcccgtctatccggcctacggcgcgccggctcttcagcccgcgtacgcagcgtacgccccgccgccgccgcctccgccgccggcgaaaccgtccgaggcctttcgacacttcttccggagccatctcgcgaccctgacgttcaactcgcggccggtcatcaaccatttgacgcagctcgcgctcgatcagactgctaacttcgagaatgcggtcgtcgtctcggaggagattgccaagggcatctttgaggtaagctcccgctgtccctctcggtccggacgctcacggcaagcgtgcatgcgcaagggggtctgcaagtgctggacgggggaggcggttatcgctcgctcacctatgctatgcgctgcgcccgtctcgtctggcgtcctgcccgatctttttgtcgtctcgcatgcctatcgactgctgtcgcgccgccctgcttcttcgctctcattgctgacctcgtcgtgcttgtgacccttctcgctgttcccttttcgcaggccctgccgcagcacaagctcccgccgttctacctgctcgactccatcgccaagaactttccggtcccttacgccgccctcttcacgcgccacatcccgccactcttctcgtcggcgtacgcctcggtcgacgggacgacaaaggctaagcttgaggagatgctacggacgtggcggagcggtgggccaaagggcgagcccgtctttggtattgccgtccaggaggagcttgagggccggacctgggggcgcgagtacgtccgtcagatgcagcaggtacggcccgtcctgctccttctctcgctgtgtcgtgacgctcgtcgaatgcatgcgtcgtctagactggccggtcctgatcgccgtccctttgcgtctgtcccgtctggccctcttcgttcgcgctgcgaccgacagcaaatgatttttgcccgttctgccgcacctgcgccagaaccgcccaaggcgccgcgggcgctgctcgcccagcagcagcagccgcaacaccacgtgcagcaccagtcgtacggccactctccgtcgccctacccggcggcctaccctccggctccgccagcactggcgcccgtcgcctactaccagcagcagcagcagcagcaagacctcggccgatcgccgcttcctcgcccgtacgcgacgccgccgacagtctcgacgacgcctctgccgccgccgccctcggccgctgccggcggactcgacacgaacctgctgagcttcttgagcggcttgcttaacaaggctggctcgtctggcggcgcgtcgcctgcgccttcgacctcggccgagggcattgcgacgcccgagcagcagcagatgcaggagcccgaggtggacgagtacgacgaggagcccgatgcgtttgagcggctcgtgctcgagctcgacgtccggctcgagaacctcgacctaaaggcgtgcgtcccgtccccgcttttgcgcttcgagagtgcccgtcacgctgacctttgattgtgtcgattgtttcaggaggctgccgcgaatctcgaccatcatttcggaccacctcccgcagcagtgccgcgtttgcggcttgcgtgcgcccgctacggcccggggcgagaaacgcctggcgacccatcacgactggcactaccgatcaaaccggcgcacgcgcgagagcgagggccgcggcaacagccgggcgtggtttgtcgatgccaaggtgcgctcttgctcgctgtcagactgccctctcgctcaaacgactgatcctcttatcctttcgcacgctctcattcccacaggactgggtgaccgatcagtcgacttcggtcgaccttgtgcccgtcgccaacggctctgacccctcctcttcgaccgccgtcaccggctcttcatcggccaacgccgctgcgggtcccagctcgattaagacgagcgcgacgctctcagccgcggtccgggccgagctcatgaagaagacgatcatccagccgtcggatcccgaggtggcggcgaggccgtgtccgatctgcaaggaggcgttcaagggcgactttgaggaagaggaggaggagtgggtctggcacaatgcggtcgaggaggacggtgtcgtgagtttcatgttctgtttgctccctcagacggacatcgactgaccctctttttctctccctcgtgcttcagatttaccacgcgacttgccggcacgacgcggccaagggcagctcaatcacaaaccatctgctcgctggtccctcggtggctcgcgcgacgccgccgccgccgccgccgccgccgccagccgacgaagccaagccggacgtcaagcccgatccggccgcgctcgcgtcgtcgaacaagcgcaagtcgcccgagccgccgtcgccgacgcctgctgctcaggaggaggagaacggcggttgcaagcgcgtcaagctcgagcaggatggagaggcgcccggccagcagccgctgtagtggcttcgctcgcgcctctcctcgtccgacctcgctgctggccacctcaccttatgtttctcccactccacgaccagtatcatccccccactctttccgcaccgcacgccacctgccatgtccacgccagcatcctgttctctctgcatgaccctttaacgaaacgatctcgagagcgcaggaaagggaattcatgctgagggcgacgacttgtgctgcgcgccgcccgcccgagcaacatgcgagctctcgatctgtgctgtcaaggcaccgctcacccgacgaccgtcctcgctcaggcatcgccctcgcccttcttgaaggcttgcagaaggtcggcaacgacgtcagctgaccgcctcgagctgcgccaggtggggcactcccttgtctactgtctggcccggccggcgctcaacaaggagggcctccctgtcatctcaagcccctttgaggctttgaccgagccgacgctcgacccctctctctctgcgcgcctccctcgtggctgaatgacgctcgagactctcctttcggcgcttcctccggaaaggaggtgagccataccagcgacgagctggccgtccccttctttccccctccctcatccatcgacttcaagcagctctccagacgacagggcccgcccaacctcagctcctcccgctcgccctcgccgccggtcagccgcctctcgctcagcaacagctctcgcctccaccgcttttccttcgagcccgcgacccctgtctcgagctcacatctcgacccacggcagctcgacttccagcagcttagccctcctccgctccagctctcgcccgatcatggactccagccccgtccgcgctccgccaggtgccttccccacccgaccaccgcagacacggaccctcggcgctcaagcctcctcacgcttcttcggaggcgctgccagccgctttggctcgcgccgccaggctggcgatctcgggcgggccgagggcggcggcggcggtggcacgtaccgcaactcgacgcttctgcacaaaggtcagtcccgtcgtctaacttcgtctcgttagcctctgcgactgacgctagtactcggattgctccctcggccaggtttctacgacttgctcgccgtcctctcgcccgagaaccgagcgacctcgcccctccgcgacgacgacggcctgccgagctcaagccccagtccacctcgccggaccaagccgacggcacgaaagccgatccctgtcgtagataccgcattcaactcgcagactacttcgccgccggccatcctgccgatgtcgccttcggccgcccggatcgactttggcgggccaaaaaaggcgcggcgtgtcaccaaggacatgattagcgctcccttcaacccaatgtacggccgcctcttctgacgctactcgcgacctggactgacgcttcgaacgacgctctacagccacgtcttgcatgcgagcgatgtcgacctcgccaaggagtatctcatctcgtgcagcgtcgaaggcgtcggcaagatccctagtgcgtctcgacgcgagcacctgcctccgttcaaaacactgacttgcctgatgacctacagaccaggagtgggcgcgcacgatgaagggcgccattcaggcccgagcgcgtgagcgtcagacgattgcgatcgcacaggtccaggcggcttttcagcgggacgtgtgcgtagcagcgaagcgtcagtgaagcccacctaaactgacatgtacttcctgctattaattcaaagcgcggacgcagctgctgctccactgcacgtcctcaacggcatgccctcctcggcttacgcgagcacgatccagtcgccgatagagaccttggcgtcaaacttgacgatcagcaccgccgcgaccgcggggcacgaaggtctcgccgcctcgcagatgactatcgcctctgccggtcgaggcagcagcgtcccgccctcgcctctcggcaggtcaaacgtcgctgcgcgccctcttgtcccccggtcgaatacggctcggtcgatccccgtcctgcgtccgctgccgaccgttccagacgtcgacggtctgcccggctcacggccgacgtctctcatcgtgccgtcatcgccacatatcacacccgagaagccggatctaccggctctgcccgcccggccaatcatcccgtcgatggctacgcttgagaaggcggccgctgcttgcatcttcttcggtcagccttccggccaagctgcgagcacaccgactgccgctgacatctcctgtacgactacctgcagagactctctatcacggcctcctcaagtcgtcgacctcgccgcagaaccaccatcaggtccgcgagcaccgccggctcgcgctcgaacgccagctcgaaagcgcctcggtgcccgatgaggagaagacgacggcccgcgagcgtctccggttgcacgagacgcactggctgcgcgagcagcgcaaacgtgtcggcgccaagaacttcactcgtcttcatatcatcggccatggcaagcctttcgtcacttcttgtcttcacgttgccgactcgcgctgacccctgcagctccgctgccgtccacaggcgccttcggcgtcgtctcgctcgtcaagcagaaggacacgggcgagctctacgcgatgaaacagctgcgcaaagagtcaatgctcaagaagagtcaggagggccacgtccgaagcgagcgcgacctgctcgctgctgccgcctcgaacggaggcaatgacggcgactggatcgtcaagtgagtcctccgtcggcgcctgcgcggcgctgcgccactgacccgtcccccttttgtgcaggctacactactcgttccaggatgccgacaacctctacctcgtccttgtgagtgactctggctctgcttcgatcgagctgcagcggattctgatcatccaatccctcttcgcaggactttgtacgcagcgccaattgctcgtcggacgctcacgatcagcgctgattgctctgcgactgatgacgacggctttttagatgggcggcggcgacctgctcaacctcctcgtcgagaaggacatcttccccgaggagtttacccaggtgcgtttgactccttgcttttcggacgtcgcccttgctgaccggcacgagaacaccttcgcgtcagttctacatcgccgagatggtcctctgtctcgagtcctgccacaagctcggctatatccaccgcgacatcaagccggacaacttcctgctcgacaagaacggtacgctctgatgtgggtcatggcgcgcgaaaagaggctcatcctcttgcactccttctcttccaggtcacctgcgcatctctgacttcggcctggccactgtgcgtctcgacaccctcctgagctataacatcgtcttgctgaacatgatttcgtcgcaattgacaggacctgcattggtgcgccctctgtctgctcacaggagcgtctggctgccggctgacgcgcgtgatgaccttcagggcccatgacacgtcctactatgaccagcagcgccagggtctgctgaaccggcacggtatcgacctcgaggagccgagcggctcgaccccgaaaaaaatggaccgcaaaaaggttgaagagctcatgggcggcgagcagggcttactgacgtggcgcgacaagaaccggcgaaagatggccttctcggtcgccggcaccaactcgtacatggcggtcgaggtcatccgaggtaccggctaccagttcagctgcgactggtggtcggcgggcgtcatgttggtctttcactgtctgtctgcgcgtgcgcggagaaatgctgaccagcccattcgctctctccagcatgtacgaggtgcggtcctcctcttttcctcttgcggctggtcgctgacatgcgaacttgtcttgaagtgcctttatggctacccgccctttgtatcgtcgagccgacagcagacgcggcagaagatcatcgtaagccctcttaaccgccgcctgcactggtcggtagaccgctgacctcgccggctcgcttggtcgccgaacagaactggaaacagcacctcaagttcccgtctcggccgcgcgtatcacaggagggtgagtctttcttctggctctctatctgcgactttcgttctgaaccgacgctgcctcagccatcgacctcatgcagcgcctcctctgcgagccagaagaccggctcggctccattgccgcgcccacgcggccaaactcgcatctcgtgcaggagcgtaggagcggctttgcgcagctgcccaccgtcggcctgccaaaggatgacggcgccagccagatcaaggtgagtcaagcccagcagtgtcgaccacagagcgctttgactgacgtccctcctttgcacagtgccacccgtggttccagggcctcgactggaagagtgcgtctcctgctgagtgcttgatgcttgcctctgctgtcgctgatccttgctctcgtctcagacctccacttggccacggcgccgtatcagcccgacatggcgagcgatgccgacgtctctcactttgacgccgatatcccggacgaggtgcgcttaatcggcctacttctcccctatcttccttgctgacctgcttcaaactttgctcgtgataacgcagcctctcgctcctgtacgtcgttccagagtaatctctcagcgactcgtcagctgacccgactgtcgttgccaggctggcggcgtccaggccaacgcgacgaaggatccgatcctccggcatcgcgtccacggcgcccagatgctcgaggtccgcaagcagaaggcttttgcgggcttcacgtgcgttgatatctttttgtcgaggggtctctcggtcctgacgacgcgctgcaccctcacccgcaggtacaagagcccacgcaagatcccgcacgcttcatcgtatggactctttgacgaacaggaggaggctgtgccgacccaggacgtccctctatcctgcgacgccgtcgagggctccttcgacctcgacgtcaactttccctctgccggcacctcgcgttcgcgggccctcagcctttgagggggcgacgcgcctcctttcgatcaacacttccacttcttatacatctgcaccggacttcctcttataccctatccgaccgcgacctgtctgcatctatcatgacgacctccttgctcgagacgaccaccgaccaggcgagggtccgcaggacgtttggcaggtcgaatgcaggacgggagggccctctgcactcgcgctctccacgtcggctgtcgccccctcttgatctcaacccacagtactctccccttaccttcgcagacccatcgcctcggcagcctacgctcctcacgaccaagcaccaccagaaccacatcaatcctcgactcccaaaactccctagacagctccctctctcgacatggacggactcgcgcggctgcttcagcagggcggcggaggcatgggcggcatgggcggcccgccagcagagacgaccgtttccgacacgtgagtccagactgccgagattgccagtacctggggctcgtcgctgccgtcagcgcgcagcctactggctgcaaaccggagctcctacgacgaggcgacgagcttggggaagcagatgagccggagctgcacttgagcccgcagcgagctgctgccgtccctgccgtcagtggctcggaactgcagctggagatgtgctgactgaaagcgccttgttccttgcagtggagaggtcgttcacatctcatcgcttgcactgctgaaggtccgtcgcatctcgagctcgtacggcgttgcctcaggcccggagagctgatcgccttcgtccgcgccgcagatgctcaagcatggtcgtgccggtgtgccgatggaggtcatgggcctgatgatcggcgaattcgttgacgagtacacggtgcgtccaaagaggcttcgcatcggctttcgcggcacgcatcatctgaccttcttgtgcctactacaggtctcggttgttgacgtcttcgcgatgccgcagtccggaacgtcggtgacggtcgagtcagttgaccacgtcttccagaccaagatgctcgacatgctcaagcagactggtcggccagagatggtcgtcggctggtaccactcccatcccggctttggctgctggctctcgtcggtcgactgcaacacacagcaggtgagaggccgccgctgccgctagcctctgctgcttcctgctgctccctgccgcttcctgctgatctcgattttactgaacgcccctccagtcctttgagcagctcaactcgcgcgcggtcgccgtcgtcatcgaccccatccagtccgtcaagggcaaggttgtcattgacgccttccggttgatcaacccgcaaacgctggtgcgcctgctttcgcaatcgacctctcgctcaaagctgtgcgactactgactctaatgactccatatcttggcccgtccccttagatggcgggcaaggagccgcggcagacgacgtctaacatcggtcaccttaacaagccgtcgatccaggccctgattcacggcctcaaccggcactactacagtgcgtccgtccgcgtccgctagaatgtcagccctgaggctgacacgacctttctcaccaggcatcgcgattgactacaagaagacggagggcgagcagggcatgctgatgaacctgcacaagaagggctggaccgaggggcttcggctcgagcaatttgacgagctgcgacacaagaacgagggcgccgtcaaggtacgtcgatctacaccctgaaagattgtcctcagcggctgaccaacgatttccatattgcgctccgcaggagatgctctcgctcgccgaggcctacaccgcctcagtaaaggaggagtcgacaatgacgccccagcagctcgcaacccggcacgtcggcaagcgcgacccgaagcggcacctcgaggacgcggtggagaaggccatgggcggcgtcgttgtccagagcttgggcatgggcgtccttggcgagctctgacgagggctcgagcgatgttgcagccccgaagccggcccgcgtgtgacgaggctctgactgggttctaacgccacctttatagcatgggacgcgtccctcttggcagcctctcgagtggggaggtggtttgaaaggtggcttgcaagggccgtccgactgagtaggtgagctcaccgactaggcgagagggcccaccaactgggccggctgaaccgcccgctgagagggctgaattccccgaacgagatggtggcccgtccatgccgaccctccgccttcaacgatggaaatcccttggccatgagatgaactatatctagagactccgacgctagctatttgagcgccgcctgcttctccctgatctgctggattgcggcgctgcacttgagcgtgacgccagagtgcagcgagtacttgcccgtcatcttggtcgtgtcgacctcgggcaacttgcctgcgaaggcgagagggggggagaacgtcagaagggcgtgcaaaggaaagatgtcggggagggagacaacgcaccatgaaggaccatctcaaactccttgatggcctcctcgtacttgcccatgcgctcgagcgtgcagccgacttcgtaccgcgtgtagaacggaataaagtggtcgagcgcaatcttgcggctatgctcctggacgagcttgaactcgccgagggcggccgccgtcatgctctccttgtcgaccggctcctgcttcgggtcgtcgggcgagatgacagtcccgtggttcggcagcgcgagcagcgcgtagcagacgccgcgaagcatgtgggccagtgcaaagtctagcacgagacggggcagaaggtcgtcaggtcacaggacaggaagctcaacttgcaagtggggcttaccgtcccagtactcttggccggagccgtacgactcgggcgttgacgcgtcgagctcggccagaagcttgtcgatgcgcgggatcgtcttctgctgcagactccagccgggcgtgcgctgcagcaagccgtagatctgcgtagccagaatcggggtcagactgggaaagcaggtcggaagggcagtcgaagcactcacgtaagacagctcgacgccgggaatcgcaagtcggccctgggccaaaaacttgcgtgacttgcgcgagacaaatttctggcgttcgcgatacgttcggcgcagtcagccggcctgtcaaagccattacagggggcaggcgacttacctcgatcgggatcgacttgccgacgactttgcggatcgccttgggtacctccttcatgtatatctcgacgacctctttgtcaaagtcgtccgtctcgagcagagcggccgcagtcgagctgcagttggcaaagacgtaagccggtcgttggcgcgagacgcgtgcaagcggtcaaggctcactagcagtaggtcgccttcgaccaattggagccctggtagagctgctcgaagcaggctgccgagtctgcaaacttgcatagggcgaggctgttgatgccgaggtcccatcgactgagcagctggagctggacgtagctgcacagggggggagggggggggacgccaggcaagggttagtcagaaatgcgagagcaagcgtcgcctgcactgaagcacgacgcactcctgctgggcgaccattgctttgtcgaggaccttgttggcgacgtgcggctggcactggagcacgtgcaagcgcgactggaagaagagagtaaagacgccgttcgggtatcgctcgagattccaccagaggatgcgagcgcccatcgggacgtcgacgtgagtgactgacggtgtccgggggcaaggcaggagtcagcgggcgatctcagatagactcgccctcggccaagcgcacctgggatgagcgagctgatgacgaggtggaagaccatcaggcccatgtcggcgaccggccgccggacgccctccttggttgccggtacctttggctcgggcaggtcagtctcccatccgccgggctgggcgagcttcgagagagcgtaaggtcttgagccctgaaggccgaagacttcggcaatctgtggcaggcgaagcgagcatgtcagtctctgagcagatatgaagcagcggacaaggctagccagcttggacgaacccggacgaccttgcccggcatcatgctcagcatcagcgcactcatgccgacgccgagctcgatcccgctccggaagtccatgtcgaccgagtcgtcaaagccagacgggtgggccttgtcgacggcctcgcagaacgtgttgagcgtccggtagatgccctcggccgagcgcatgttgagcgcttctttgacgagcgccatccactgcaagtgagcaaatgaggtcgcagcatcagcatcagcatcaggcgagagtaggccaggagacgaggtcgtgcgcacctcgccgcccgagatgatgccgaggacggccttgagcagcagcgtctcggcgtaaataagctcggcctgcgggatgtgcaaaaggatgtcagccgccgtccgctacaagaggcaacagcgatcagcgcgacgtacatgccgctcgaccttgctcatgctcttgatgaaggcaaccgtccccgctgtgcctttgacgaggcccgtcaggcgcgagctaaagcccgtctgttgcttgcggagcgaggctgagagctcggtgcagtaacgcgtgacgtcgtgcgcgtgcttgaggtcggccggctcgaaggtcatgatgccctgtcgaaggaaaagaaaaaaagtgttggagtcattcgctaccgcgtgcgccttttcgactcgcgactgcgtaccttgagcgtacacaagatggcgtccgccacctggtagtaaagccgctcgcgctgcgggtcgccctccttgacgacattctccgcctcgttaatgtgcgagttgaggaagaggtccatcacccgatggcacatgcggaggtcgtcgtcgagaatcgcggcctggtcgacccaggccgacgggcggaagacgtccgggacggggttggtcgtcgtccgctcgagcgggtgcgaggtcgatggggaagggatagcaacggcagcggcgacatagggatcgactgcgtgggggagagcgatgactggcggcggaccgtcgctaacgctcttcggcgcggcaccggtagcagcggcggtggacacgggagcagccattgctgcaatcacggccggccgagagccagcagcagactgcggtgcggcctcttcctcctcttcctctccgacctcgctcaggccctcgtcaggagtctcaaacccgagatcgtcatccgacgtctcctcgtcggaagcctggagtgaccagagcgactcgcccgttgacatctgcctcgggtgggtgttgactcccgtcggacgagcggccgacgagggtgtcgtcggcgtgagagccgtcggagacgagacgtacgccgctgacccggcggggacggccgccgaagcagtgtccgccttcgggtccgaggcgatcgcgagcagcttggcgggcgcaagcgactcgccatgcgtgagcggggcggccgaagtgcctgcgatcacgctccgtttggcagcaggtgtcgaagatacgacggcgctcgaagagtcggcgtccgagtcgtcgtcgtcgtcgcctcgccggtcacgatcgctgttgtcggcgctgtggccgaggctggcgaacgacgccttctttgactcgccccgctcgcggcgccacatcttgtagcccgacgttgggcgcatcgcgccctcctcgccggatgcagcgccgccggtagaggccttcgagagcgtcgctgacgctgcaggcggagggcgcgaggcttggcggccggcggtgccgacgggcgagcggccgccgctcgcgagcgacgacgatgacgacgaggtcgtcaacccgtttggtccgcccgaaggcgaccttgagggcgagtccttgtgcaggagccgcttgaggaaggatggctttcgcctggcgagcattcgacgatgaagaggtcagcaagctcgcatcgcgagggacatggtctcaggctaggacgcaccggacgggcgtcgacgcgccgtcttctctccgaccagaagccgggctgtcaggtacagcaggactcgtcgtaccgctcgcactcgggctgccggtgctaatgctgctcggtcgcgaacgtcgcgagccccaggtgatggccggctccttatccttggccgagggcgcaaggctggccgcccgactctggacggcgccggtccctcctccgactgagggcgacggcggatgcgtcgtggtcggtgaggcagcgctgctggcgctctgcttctggagactggccgacgatggccggcgcttgaagagaggggccatggtggggtgatgcggctgcgatcggagcgggtccacaggggtgggaaggggagggtgggcccaaggagatgacggcgctcgagggccaccttctttcgctttgggtttctctggcggctctggcgcagggaatctgacttctgaccgatgggttgaccggatgcgagcagcctcgaggagagacgggtagagagagagcggatggcagttcggagggcgagggctgcgtctccccgcgagcttcgttctcgggcgggagaggctcggccagttagaagggaggcgggcgagaaggggtgctcagcccgccaaccttagcgctccttcgatttgcataggagagacttccgcctgatcttctatcgcgtaacagaaccagagcgctcgtcttagaaggccagaggaagtgcgacgggcagatcgtcgtctccagtcatgccggacgctgggcttggccgcgcgcagcagggacctcgatgagcgtcggggcagcagaggacggacctggcagctcgccgatgcgcctctggtcctgccaggcctagacatccagttagaccgaccagacagtgagcacgtctgctctgctgaagtatcattggaggacgagtcttgcaggccgcctgcttcggagccgaccattgcgcgcgcgcgtgggccgtgccagctcatcagcccggtcaagctagcttgcgcccatccccccgactacatctctttcgcagaacagaccgcgtcttccagcaagtcatgaaggtagccactccgctgctggcactcttagccgtcccggtcggctctaccgccgtcatcgccgcggatcaggccagttcgatattccagtacgaggtccgtccttcgcctcctcccgccttccctttcagctcgacgataggccgtctgcctctctctcctccaccaaggcctgacgattctttcacgcgatcccctagtccgacgtcgcccgcctacgctcgatcgtcgtcaactcgctctacggctcaaaggacatcttcctgcgcgagctcctctcgaatgccaacgacgccctcgagaagctccggctgacgggcctgaccgatccgagcgtcatcgtcggctcgggtgagctcaacgtcaccatctcggccgtgaaggccataggagaaggtggcgagccagggcagctcgttcttcgtgatacgggcatcggcatgcggccagacgagctgaagacgtacgtccttcctcctgtgagatggccgccgtcgaggcgcgtcgagccggcggaccttgggctgacagcgtttctctcgctcattccgtcgcagcaaccttggcacaatcgcaaaaagcgggacgtccgacttcctttcgaaggccgaggcttcgtcggcccctctcgcgtcggacaacctgatcggccagtttggtgcgagccccgcctgtgcttcggacgagcggtcgctttcggcactgacatctgtgctcgcgacccctcgccctctcgtactaggtctcggtttctactcgtcgttcttgattgccgacaaggttgaggtcgcttccctccccccgcccaccgcagccgatcccaacccaaagcagcacgtcttccgctcgaacgcggccggctcgagcttcgaggtctatgaggatccgaggggcaacacgcttggcgagcgcgggacggagatcacgctgttcttgcgcgaaggcgagaacgagtggctcgaggagcagcgcgtgagggagcttgtgtgagtggcgccaagtaaccgtgctccttctgcagcactcggtaagctgactgctcctccctgacgcagtgagaagcactcggccttcgcctcggccttcccgatctacctcgagacgcacgtccagtcgacccgtcctgttttgcctctcgagcacgagcccgagaccctagccgacgccgacgaagcgtccgtggaggacgacgacgccgccgagcccgagaccgaggaggtcgagactgtcgcgtttgagcagctcaacaagcacgagccgctctggatgcgcgagcccaagtcggtgaccgaggaggagtacaacgggctctaccgggcgctcagcaaggactcggtcgaccccctcgcgtggctgcacttcaagtgcgtctgcctttctctccttctccgacacgtcaactgacttgctcttttctgctttgcccaggggcgagactggcgctggcatcggcttccgctcgctcatctatgtcccctcggaactgccggtcgacttctggcagcgggcgaacgacggcgttggccgaaacgtccggatgcttgtcaagcgcgtcttcatcacggatgacctcggcgatggtttcctgcccaagtggctgagcttcctccgtatcgtcgtcgatggtacgtcttgccttgtgttttcttgcaaggtcgtatctgagctaatatggtccacctttctccctttgcagccgacgacctcccgtgcgtccgacccaggtctctcatctttttcgtacctttcctgacgcaattttcacctcaacagcctcaccgtctcgcgcaatacgctctcgtcctccaagttcatctcgcagctctcgcggacgctcgtcaagcgctcgctcgatctctttacaaagcttgcgacgaacgagccggagaagtacgcgaagctgtataagctcgtcggccatgcctttaaggctggcattgccgaccgcagtccggagaagacaaagctggctggcctgctgcggtttgagtcgaaccacatcaactcgacgagcctcgacgacgttcgtgcttcgctgctcgcggcgaccgcctcggctgctgactttcgtcccctttccctttcgtgacagtacgtttcgcggcgcaagcagggtcagaagcaggtgacatttggatcctcctccgttcattgaccgtaacattctgacactcagcctcgccgccgtctccagatcttcttcctcgccggcgtcggccagtctgccatcgaccttctcaaatcgcccttcgtcgagaaactcgacgcgcgcggctacgaggtcctactcttgaatgagccgctcgacgagattgtcatctcgcacctgcggacgcacgactcgctcgtcttccaggacgtctcgaagaagggtttccgcttcggcgacgagggtaagtccgggcaatctacttgcgaggctcaatccgtttgctgatctgcccttcacgcagatcttgacagggaggaagaccagcagatgcaggcgcagatgaaggacgactttgcgccgctcgccgcgtggattaagcaggccttcggcaacatcatctcggagggtgcgttatcttggacgactcgatggccgatacgttcacgactaacgatcttctctcattgcagtcgtcgtctcgacgcgtctcgtctcgtcgccgacggccatcgtggccgagagccacggcctctcggccaacatgatgcgtttgatggccgctcaggcttcggccgctggcgaagacgacccgatgctggcgttcgccaaaagccagaagaaggttctcgaggtgggtcgtacttgtcagccgcttttcggtcaacagattctcatcagatcctcggcctgttccgcagatcaaccctcattcgccgctgatccagggcctcctcgaggtggttgcggaggcggacgatgatgatcacaaggcgggcgagctccgggatacgattgagaccctgctcgacgtgacgctcgtccgctcgggatttcctgtcgaggacatgaacaggttcgccccttggctaggctggtggccgtatccgacgtctgattggcatcttctctcctcgcagctttttcggtcgggtcgagggcctcctccggcgctcggtgggcgtcccgaccaaggccaagacgtaccagccgccggtcaagcccgccccggccgtcgagactgtctcggtcgagcccatggcagtgcccgactacggcaacctcgccgacgccgacgaggccgaggttgagaggctcctgcgcgaggtcaaggactttggcccggccggcgccgccgcggctgatgagctcgagttcgaggactttgaccgcgagcaggtccgacgcaagatgaccgacatgcgacaccctgagctatagagaggtggtcgacacgctcgccatcctccccatagactggcctggccgcaaaaggccgcaaatagcatagaggtcattcaatcgagtagcaagcagtaagagtctaacggaagcagtcagaggcggacagaaaggggttttttgatctacagtgggcgaccgacgggtccggaaaaggaccctctactcgtcagacgagacctcgtccgccccggcctcgctctcgtctgcaccgccgccgccgtcaacaaaggcagccagcagaagcgggtgcacccgctggccatcaaacctgacgagggcgggctccgcgccgccgacgggctcgagcgtcgggtcctcgcgggcgaaagagatggcgagggcagtctcaagcgcggtgatgcgggcgtggagggcctcggtactggagagagggacaggcagagcagggcgtgtcagcagcagtcacatctaaaagtaaggaacgaaaacgacgcactcagccaggacgagccgcttgcccgccatgttggcgagctggccgtgcgggcagacggtcgggcatccacgtgcgacgcacgatgagcacggttgctgctccttgaggttgcactgcacatggcgggcaaggtcagcagccagtcctcctgtaggagcaaaagagaagcgagcagacgaacccgcatcttgagcctgttggcagcaagcgaaacagtggttagtcgtcgcatacattacacgaggagagagaagagagacgaaccgtcggcattcggcacagctcgtgggctccttgcctcgccgcttgccattctttggcggcggtgcgagcccagccgtgccagagcggctggctgtggtaggcgtggccttatccggcttgactggcgccgaagcgccagccttctctgcgatccgcgaccgcttgaccgccgtcaccggcgggccggcgtcgtcgctcgcgaggcttgaggctgcttcggcccgagtccggcggcggcggcggctttcgaccgacgcagcagggacgacggcaggggagggcgtcgagctggcggcccgacgaaagtcgaccgtcttggtcgcgccggtgctgggtggtgatggagttgaggatccgccagacgtctgcggtccctggtcagcggccgagcggtcagacgccgagtaggtgagtgaagggagggatgatgtcggcgagggcgaaggcgcgcgcgagacgagggacgacatcagaactcgaggaggcgaccgcgcaccggcgaggttgcgtttgatctcggtctcgtcgtcgtcgtcaaacgtgtcggcctcatcgactgccgctccgcgccggagggacgacgacgggtaggcgaacggctggacaggcatgtgctggaacgtccaaggatcgccgtaggccatctcgatcggatggcgggcaggtccgtcgtcgtctgattcgtccccgacggacgcgaccggcgaaggtggcgtaaccgggaggtgtgagccgacagtcggcgagccgcggaagatggcctgcggaggggcggccggatggaaggtggtcgagcggaagaaggcgtccgacgggtggagcgcgtacgacgggtcggctaccggcagatgggagtagccgccgtaaacgggctgctgttggccaaggaggtgggtgtcggggtggaacgacgcctcgcttctcgccgacgagtgactccagccgagcgcggtcggtggacgtgggctgccgtaggcaaaggcggccggcgctccccactcggcgtaggtcgggccgacggcggacccgggccgagagcgaggatcgagcgcagacgagccagaccagtcctcgacctggtgtagagcggctgcctgggcgcctcgtgagtagtagtcgccaggccaggccatgatgggtccgccacgccggcctgggtaggacgactgcgggacggacgtctgcgaggttccggtcgacatctgctaaggggccgatcggggtaagtggcgtcagcaacagtgggggctgaagaggctgataggaggagtcgaagacgactgaccggcgagaggtgtcgggaagctgacgagcagagcgacaacgggaggatggaagagcgctcatcgcgtcggccaacgaggccctcctcttgagggatcgatcatcacgcagcggcattggatgcgacactcgccatcctgctctctgatgcagcgggggtgaaagggaggccgtcggaaggcgctcggcgaagggtctgcgcccgggcgccggccggagctcgagaacaggggcggccagctcggtgacgacgacgacgacgactgtttgactgtaaagcgccgtcaagagggttgggatgtccgcgaggcacctgttaccggctgaggggcaattagcactcctccgcagccgattaggggtgggagatgctggtctgcgggcaggtgggagaggcaagccgagcggtggccgggccgacgagaaaggggcgggtcgaccgacaagggagccctacctcgctggcctggcttcggtcagcttgcttcttcgagcgcgtacctgccatctggccaggacggggattgattgcgtcgtccctgaccgtgagctggcccacatcaacgtcgctgttgacgaccagccagtaaccacaatagcggcggacttggcgatcgggcggcggcggaggcacggagctcgacggcttcgagtctgacgcctgtctgcccctgaaccagcagctgcctccatcctgccctttcgccgaccgctcttccctccagcaccagcagcagcggtctagttcgagcacgtcgctccgatgcttcctcgacacctctcctcgtcgcggttggtggtcgttcggctcgctgcacaaacctcggcgcggccgacgacccttcgagcagcagccttcgtgacccggcagctctctgccgcctcggcctcctttggcacctcgatcgggcagcctttctggtcgaaaggagacaggaaaccgctcgagctaccgaagcatcggtcgagggactcgccgccgaccctgaccgagctctttgacgagcctgcagcggtcgcctccagctcgaccggcgccctcagcccgaccggcctcttcactcagccgtcactgacgagccctacctcgctgcccgagttggccgcgcacgtcgtccgtcgcgtcgaactcattctcgctcgtctgcaccgggcgccgagcgcaggccacgccgagctccagctggtcgtcaagaactttgaccggctgagcgaccttctttgcggagtcatcgacatgtgcgaggccgtcgtcaccctccacccggacaagaagtggcggcgcaaggccgaggagacgcacgagggtctctgccggctcatgaacgagatgaatgtcgacgtccggctttacgacgtgagtagtgcctcgagctggctctgcttgcccgagcccgaagctgcaccctcggcggcgcgcagtccgtctgagaggcacctcgtcctgacccatcgcccgcttactctcccttcccataggcgctccgagcggcgctcaagacccctgaagtcgtcgcccgcatgtcgcaggaagagtatcacacagcccaagtcttcaagcacgacttccaaaagtcgggcatccacctgccgacagccgagcgtgcccagttcgtctcgctgtcggacgcgctcctcatgctcggccggtctttcagcatgtcgctgtctgatccgctaccgccggtcatccttcccgatgcgagcaagctcctgccaggcctcggccagtcgtttgtccgccgggtcgcctcgcgcaagggcgtcgcgacgatccagcccaactcatgggaagcgagcatggtcctccgcaaggccgaggacgagaatgcgcgacgagccgtctggacggccggtatgacgagcgaggagagccggatcgaggtgctcgagggcatgctcgaagtgcggcggcagatcgccggcctcgtaggccgcaacagctggggcgagactgagcttgagaataagatggctcacagtccaggtgcgctctcaatacgcaggactcgcgcttgacgtctgacgctgatacttgtcgcaatttaccagccaacgtgacgacattcctcgagtcgctcgccgccgccaaccggccgacgacgttggctgagattgacgtccttcgcgagctcaagcggcaggaccgcaacctcgccgatttgcccccgctccatctctgggaccgcgactactacctgacgaggcatcaagccggtgtcgttgcggcggcaccgacgctcgatccgctcgcgcccttcttctcggtcggcaccatcttcaccggcctgtcgcgcttgttcgagtcgctctacggcatcgtcctcgtgcctgttgagacgcggccgggcgaggtctggcacccatcggtgcgcaagcttgaggtcgtcgaccgcgccgacgagggcggcgccgtcatcggcaccatctactgtgatctgttccatcgcgacggcaaggccggcaacgcagcccactacacggtccgctgctcgcgccgagtggacgatgacgacctcactggcgacctgccgcccggccaggccaactgggcgttcgacccgctcgcaggtgggctccaggtcgaaccggcagcgtccgcgacacgcgagggccgcttccagctgccggtcgtcgtcctcaattgcgactttgactcgtcgggtgccggagcgacgctgctctcttggcccgaggtcgacaccatcttccacgagatgggccacgcaatgcactgtgagtgccgcagaactctcaatgcgcaagaatgtacctgacgtgtaccgccttcgctcagcaatgatcggccgaaccggcctacacaacatctctggcacgcgggtcgcgaccgacctcgccgagctaccttccatcttcatggagtcgttctcaaccgccggcatgctgcctcacctcgtctcgcaccacaagacgggcaagccgccgccagaggagctccttcgggcccaccagcgccagcggtcgcactttccttcgctcgagacggcaacgcagatccacatggctttgctcgaccaaggtctgcactcgatctcgccggccgatcagggacggatcaactcgactcagatctacaaggacgtcacgaacgggctcgacatcttcccggccgaacctgggactgcgccgcagacacaattcggccatctgtacggctacggcgcgtcctattacgcctacctcttcgatcgggcgatcgcgagtcgcgtttgggacatcgtcttttcgcgcggggccggcggccttgacggtcttcgcggcggcggcgagcggatgaagaacgacctcctccgctggggcggcagccgtgattcgtggggcatgataggcgccctcctcaaggacgacaccatccgggccggcggtcaggcggccatgatgcgcgtcggcgagtggggcgtcggcgacgtcaagtagcgatggatgtggctactaaaggaaaagggcgagcaacggctccagcgtcggctcaagtcctgctcggtgaaagcttcgcgccgctcaaacaggcaccgaggaagggcagcactgacagatacacgtttacttgggccggatcagtcaatagcggtagctgacgccaagagccgctttacgagcagggaattgtatccggccgggccgggagaagggcgaaaactaagggcggagggggtgcagacggccgagggtgtcgaggccgtgacgatgaggggaaggcaggagatagcgttgcgaccatagaggggccaccttcaacatgccagctgataaaaagtcagctggtgcgaggtgcagtgcaagagagagcgaggagcgacgcacccggtcattgctgcttgatcgcccggcgccgagggttgtactggcgagacttgatgaccttctcgagcggcgagagggtgcggcggacaggcgggttgcatgaggctgctctgaccgccgtcggtgcgcagttggtcaccggggaatactttaggccgtctgtgccttctccgttgtccgtgaagactaatgtgtctatggtttgcagcttgccgtcgtttgagtagtaacagtaggcgacagccttgcttgtgctttcttctgaggagttggtactgaaggacgatcggcatcagtatggcacaggtacgaggggaagcagggggacgctctacgcactaaaggcaggccgtcctatcgccagcaggattgccatccggaccgctcgtgagaactacgccgtcgtctttgttcccgggttctttgacggtgtactcgagcgggcaggtgatgatgcatagtccgttaggaccctgcgagggcgtgaaccgcttagcgtactcgacgcccgtcggcccctgcctgagctcggcagaaacagagggggcggcggcgacgagcgaggcggcgaaggctgcgagcttgagcgaggtagagaggagcatggcgcggggcagaggcaggggcagggtaaggacagaggcaggggcagaggcaggggcaggcaggcggaaaattggaaggggcgaagggcggtgtgatgttgaggaagaagaagaagcgaggggggtaagcgtgcctttgaaggcagacgagttggcaccgcatcgagcagctggccggcttgttcggtcgaagagcgaagaagaggaggcgcgcagggtctgcttgtgcagggtgcgaccaggacctgtttgggtcgggcggtcgatcgcctcctgcggctcggtgggagagcaaaggcgaggtctctggccgagaagccaccgccggtcgaaagtcaacttggtgactgcagaccttgccaggtgtcgaccgcaggtccagcagcaaaagatgaggcgaccgaccgagactgctgctcgacggcgcgctcgaggagcaagcgagtaggccgaccgacgcgctggctccaggcgagcgagcgagaccgtgccggctgatccttgtctcctgatggtcctgctgcaggtcagtgtacaggcatctccgtcagctactgccagcttgtgcgactcctagagtccttgagcctggtcgacaggtctagcaaggtcgccgagggtcgtcgtcaggcgggggcaggtcgagctcgcgtcctcgcccgcgtcgtcgcctagcgcccgacggccatgccagctgtcgccccgtctcccgttgagcctcacactcatccgactgttggtctgagctgacagcgagctgcgtagcgaggcaggccgccagttacaccctaccctccgtcggtgcaacagcttgccgtagtcgactgagcttcctgcaacggctggctcgcccacctgcccgcctacccacccgcccagtcgagctcgcccgagtcgttgacatacccgtcaaccttgcttggtgccgggctgttgcagacagtcctgcgcactgatgatctgcccggcctgcccacgacattgcctcgcctcgctcttgcagcagagcctagtcccctgcgcatcgcatcccgctggccggcccactcgtcggaacgccagaagattgtgcgcccggctccccttcaccagtccaaccgaacgagagtccacgacgggggctataatcgcttgcgttcactcaccttgctcgttgcttgctccttgatccaacaccgcttcccagcccggcagagagctttgccttgctcgctgaccctctcccacaaccctctccctcctgctcttgcccgcccatccttctgaggcatctctccctctttccctctggcgccccaacctcgcctaccgtcgtcgccagcatgctcttctccgcaccggccaagctcgccgccctcgtcgcctccctgcttgcggtcgcttccccccctcgcctcggccgagcgtcgtcagggccccagcggcgtcggatacgtcaagcggttcgcgacctcgcccggtgtctcgaaggctgcatcggcacctgcccgtcctccgtaaatggcgtgcccttgtccggtccaacgcaaggtgagaatatcgaaaatgaggagacggtttgtgtttagtgcgtcggtccaatcagccatcacatccgtctacgactgatttggcccgccttctcatactccctcaaaaaagcttcccggtctatggctgcctctacagctccaccggcgatgtccccgccggcgcgaacaacccttccgcctgcctcggatcggccgtcaagtcctctggctgcttcaccaagcgcgccctttcgccgctcgagaaggtctacaagtcgcgtcagtatgaccccagacggcgagctgtcaagcggcagtagctgggtcatcgctttgcttttgctcgctggcaaggtgcgtcttctaccctatccgggcgtcgctcgccaggtcccgcgtcggctgaccttcgccgctcagaggccgctgcaccttatcagtgccactacgtcgcatctctcggccttctctgcaatcgatcctcttcctgctgctgccggcccagccatctcttgtctccttctcctccctcactcttggcccggccggatgcaatgccactttgcaggcacgtcggcatctcgctctgctcctcgctctcagttgtcctagcccgggcggcgccttcttgccgctcccttccggctcttcaagatgaagggggcaatccgggcgaacgcgatgttagggtcacaagcatgtccctgcatggaagcctcgtgtccactcgtcggtgcacctgaatcctggtgccgcatcgtccacgtggccctgttgagttgtaaacggtcatagtacagcaagagggcaaggcccgagagagtgcgtgcaataaggagagaagagaaaacaaaagccaatcactcgaaggcattctcgaggtcggcgtcgtcctcgccttcgagactcgcgaacgagaggaaggccgctggccgatgctctgccgcccagaagccgagcggaacaccgagcgagaccgagtagggcatcgttggtgaaaagagctgcgagaggccggtcgagtagttccagacgccgccgtcggggacgagcgtgctgccgaggatccggtccgagaggagcagctggacgcggttcgccatggacggcgagtagccagccatctggccgttgacgtcctgctgcttggctccccacgagtagcccgcgggcgtaagctcccaggcagagagcgagatggagcccggggtaaaggaggcgctgtcggaaaaggatgaggagtgatggtcagtcggggtatccttcgaggcagcgaggggcggcgacagggacgtacgtcaggcagaccgactggttgggcagccacgagtcgttggcgctcatgatcttggcctgagtgacgacgtcgaccgggttgaggtgctgcatctcggcggactgcgtcttgagccagccgagcggctcgaggccctgaagcaggaagtcgtgctcaggcagggcgtgcgggagctggacggacgtgttggagccgtgctgcgggacatagacgatcgccttgatctccttaacctgcgggttgtcggccgggcttgcgccgtaaaggtaggcggcgacctgcgtccggaggtcggcgttgacgacaaacgtccggaggaggttcttgggcatgacaaacgtgagcgcgccggcgtcgtctttgacgtcgtcgttcgagacaaagacgtgctggacgcggagtggcaggttggtcgccgagatggcccggacgcgccagtccgacttggacgagaagacttgctgctcatagttggtcgtcgtcgtcgtcaggatctcgtcaccgtggatctgtagcggcacgaggcgggtcagctcgatgcaggtggaaggagaaggagacacagcaggcagggtgagggcgcacgttggtcgtcttggtctgaacggccgtaatctgggcctgggcctcggtcgacttctcaatgtcggccatctgctgtcgctgaatcgagggcgcggcaatctccatgccgagaatgatgtcgcggatctcgcttgcggtgagcgaggcaacgttaaccgagttacgcttgccaaagtccgagaggatgaggtccttgagtgcgacctcgaccttcatccactcctcgtcggcgagcgtcggccagatgtggtggggctcggtgatggtcgccttgtctggccggaggatgatcttggccttttcgttgttgacgtggagcgcgcgcagaatcaggatcaggcgcgagaaggccgtgtaggatgagatcgacttgagccagtcgtcgtaaagcgagaagaggaccatctgcggctgtgttgcccggaggatgaggtcgccaaacttctcgagcttcatcgtcgcctggaacggcagctggagctctgagcccttgatgacgatattggggaagtcgagcaggtggacctcgagcgggtcgagcatgcccttgcgcgtgacgatgacctgcttcggctgctcctcgaccggcagtgaccggatcagggcggcaacctcctcggccgtcttccacttggcgagctggccgagtcgcttctggccagcccagactgaggtgtggataatctttaggaagagctggccggtccgcgggttaaagataaagatagcgccgttgatcggcttggtcgtcaggttgccctcgaacgtcttgtggatcgtgacgcggtagacgttagtgtcgtcgacaaaccagatgatctggttcgaaaagagctccgagtagttctgcgagttgaggtatggctcggtcggctcggacgagtagagctggaggcccttgcggatccgctcgcgaaggacgtagagggccgggttggccttcataatcttgcccatcgcctgctggatcagcggcttcatgccggggaaccagttgccataggccgagtggaggttgtaggcgaggtcgatcgcgatgagcgcgcccgtcggcgaggggtagatcgacatcgagtcggacgtgtagtcgaggaacttggaccgggcgtagcgctcgatgtcgtgcgagtcaaagtcgccccaacggagctggacgtcgacccaccacttgttggacgtcgtcccgtcgaggacgtccttctggtcggtcaggagcgagggccgcgagatgttccacttataggccgaaaacagaaggatgtcgccggcggacgagttcatcttgtacgacttgcgcgggtggatcgtctccttctggaccgtctcaatctggagcgcctcgagctcctggtcaaagacctggcacaggtccatgacgaccgactcgtggattttctgccagagatgggcgcggaagatctggatgagcgagatcttgagggtcggaatcttgccgtgcatcatgatgcccgtcaggtcgagctggacctggaagcccacgtaaacgttggcgcggttgatcgtcggcgaccctggaggcaagagagaaggagcaggaggtcaggcagcagtcggcggccgaggggcagatgagggaagcctagagagacgcacaccagagggtgaagcgacggttggggatctggttgagaccggaccgctgggcgttggtctggcgggcggcgagagcagagacggggtcagccgacaggtcaacgcaagacgtcgggaaggcaacgacgcacgagcttcttgaacttcatcgagtcctcgaagccagaggccttctccctggaagcagaaggggtcgggtagggacgggtcaggggcgcgagcgcaaacgcggggcggaaacccgaggggcacgcaccagaacagtccctcccaggttgggaagtaggtgcccttgaagagggtgtgctcgaggatcgactcgacgccgccgagggcggcaatgacgtcgacgcggtagttgttgagctgccagagcttgccgtcgtgccgctgggacgtccaccagaaggggttgtgcttgagcagctggtactgcttccagtcgatccgaacacgccagcccttgtcgtaggcgagcgtgtggcggtccttctgaaagagcgtgttgatgcgcgggatgccgcggtcccacgagtcttcgaggtcctcgagcgtcagccgccggttctgggcggccgcctccttgcgcttcatcgagtactcggaccagacgcgggccgagtcctggaactcggactcccacggctggaggtagcggaacaggttggggatgagctgctcctcggtcgtcgtcatgcccgaccggaagtgggtaatgccgccgacatccgtctgctttgaccagcggaggtccgactgggggatcaggacgtggcccatcgagatcatgccgaggccgccaatctccttgggcgagtagaagacgacgggctggagagtgaagagggacgattagccgagaggccggcagcgagcgaggccagagcaggcgccgagtgaacgcaccgggaaacgcgacggcatcttcgagttgaggccaatcttgacgcgcgtctggaccttgttctcggccttgacgagcgagtcaagcagctcgttcgtgtgaatgacggcctcgcggtagtacgagacgagcgagatgatgcacgtgttccacttgttgacgattttggcaaacgttgttgcgcccgacgacatgagcacctgacggatccggttgttgaaggcctggacgccgtcgtccgaaacgcggacaaacgcctgggccgtccgctccttggtctgctcgttgttgaggttccagaccgagtcggcgagcgagaacgactcactcaacgtccggatcttgggcaggatccggatctcaaagccgcagtgcgaaaagaggatctgcgggttgtccttcgagtagaccgagaccatcgtgtcgtcccagttgatggtcgtcagcgacatgggcagcgagttcttgacgttccagaagacggcccggccgaggttgacatcgtgcttgacgagccgcatccggcagtcgcgcggccagcagcgcttcgtattaaagccaatgacattctcgttgttcgggtccgggttggccgaaaggtagcgctggatcaagtcgcggctctcgtcggcctcaaagcggaaaaagatgtggatccggtcgacgtagcgcgtgtagagccggatcgggtgccgcgtctcggtcgccgtgtcgcggaactggaggaaattgttgggcagctggggagggccggccatctcgctcgcccgctggaggccgaggatgagcaggtcctgcgggcggagaacaaagagaggagggtcatcagcaagtgagctgctgcagagcgcgaaacagggggaagggcgccacgcacgagaacaaggccgtagtactggaaaacaaaggccgaaaactgaaggccgcggatcatgccaaaggtgttgacgtgcgacatgtccttgtaggtgaggactgggttgttcttggcggtgatgtagtcggctaggttgtggtcgaggatgagccggagcagccggttgaggagcgtcaggtccatcttttcgtagactttggcgaggaccgtctccatcatgacgttggcctggccgtcggccgtctcccagacgtcggtcaggttgttgatgccctgggccattttgtagacgagcagcggcggcggctccgtgtcggccggcttgatccacgacgggaagaggccgcgcttgtcggcctcgaaaaagaggaactggtcgaggtaggcgtcggtaatcttctcgaccggctcaatgtcgtagcacgggatgagcttgtcgtacgtgtcgaagaattcgataccggcctccttgaaggcccgctgcgtcagcagcagccgcttgacgcgcgacaggcactcgtgcgggttgtcgtaggcctgctcgatgagcgcaagctcctcgcgctgcgaggcgttgagccggccctggaccgagtaggcctccttgagcttctcgagcgcgaggacgagcagcttggtgtcgtgtttgtacgacagcggcgggaacgggatcggcgcaaacttgcggctctcgagccagtggatgaccgaagcgtagatggcgacggcctcctcggacgagatgtaggggccgtccttgaggtacgagtgctggcgctcctgctcggccttgaggtagagccgcgtcagccggccaaggttcttcttgctgacggccttgtcgaccgtcgcgccgcgccggatccgctcgcggttgtagtgggcgaccgacgtccaccagtccgacttgctcttgatgtagcggaggatgatgttctcgatcgcggtcggcatgccgggcaccttccacggaatattggccttccagcaccgccaggcctcggacaggtgctgaaggatcgtcttcgccttgttttgcttgatcgactcgggcatcatgtcgagaatgtcgtgcatgacggccgcccggagctcgaggtcaaagtgcgactcgacgcgctgcttggtgaccgtcttggcgatgcccttggcgttgcggccctcgaactgacgtgcgagcaggttgttgagccagcgctcgagcagcgggacgatacctggcgggcgcgagaggggcaaaggatcagcaaacgcaggtcgacgagtttggagaaggatggagggacggaccgcgcatgaagaagagccagacgcgccagccgggctgccagaagccgactccgggacccttgccgacggggcccgtgttaaagcggtaataaatgaggtgcttgaggtccttgcacatccggatctgcttcatcaacttgtatttgtagcggtacactgggcgtgcaagaaacgggagagtcagcggatgggtggaggaggacgagcaagagcgggaaggcagacgtactgccggtaagctggccgacgtgggcaaacatgtactgaaggccatcggcgagctggaaagcgtcaatgttgccgagccggaactggacgtggacgtcaacgatgagtttcgtgagccggaggatctcgcgacacagatggactgtggggcgaaagaccgaggagtcagtcaggcgcaatcgccaagggccgagcagcaaagcgcaagacgcacaggcgtttccgaaacgagacttcttgcgctccttggtcgtcagcgtcttgaccggtttgaggttcatgttctacagtgagaaggggggggggttgacatcagttgcagccagctgcagctaacgaggtggttagcagcacgccagccggacgcacgtagtcgaggtggaggtagttgaggttcttgcggtggatgagcaggttgagcatgttgaagccctgccggcagacctgaagaccggcctcgacccagtcaaccgttgtgctctgaaagaacttggtgtccttaagactcttgaagaggttgcgcttgaggtgcggcttggggtgccggtgcttgagcgcgttgaggacgtagatcttgaggagcttctggtacgagacgcggaccttgaccggctgacccggcgggcagtgctcgagataccagttcttgacgagcccgacgtcctgcgcgcggcgcgtccggcctgagcgccggtcgtacgggtagggcgcccaccaaagggcgatcgcgtcggccgtgtcgtcgttggcgagctccttgtcggcgaggaagggctcgatcgactcgggcagctcaaagtcgtcctcgtcgtcgtcattgacgccaaagacggcgtcctcgtggctgacgagcgggaggttggccgggccggccgaccgggccgagacggggttgatgagcgggtcaaagtagaaggccggcaggtcgggatcctcggtccggatatagacgttcttggcctcgtggtagacgccgacgtggacggcccgcgggagcgagttgtagaggtgcgggaaggcaaccttgtactcggtccggatctggttgcggatgacgaccttgttgatgtcgttgaactcgttccagtcctcgtcgtacgactccatgtcgcggtagagcggctcaaacttggggccgcccgggatcgccatgttgagcgccttggccgtgtagaacgacttgaggtcaaacagatagaaggcgttgcgatcggcaaagtcgctcaggagcgtccgcccgagccggtagaggttggccgtctgcttgaggctgagggcgtagctccggtagctctcgccgttgacgtgcggcgtgtcgacgagcggcttcgggtcgtagaaccagtcgtagacggccgcgtcctcctcttcgtcgagctcgagctggatgccctcgagcggctcgacgtcgagcacgttgtcgccgtagtcgagcggcggctcctcgtcgtcgaacggcgggaagcggagccgcttgaagtgccgccgatcacgcttctcgcgccgcatcgcgatccacatcgtcgcccactgcgcgtggtactggaagggaaagagggcagcgaagcaaagcagaggaaaatcagctcggccggacttgcgcaagagcgcgacgaggaaaggaggcacgcacgatcggctcgacgacacgaggaatctcgttgacaaacgtgatggcgcccgaaatgtggtagaggaccttgacctcgcggacctgctcccacgggttggggatgttctcgagcagcttcatgacggcgtgcgggacatacttgagcgcgccaaggtggacgcgcttgtcattacggaacttgcgcgacgacatgtcgccgtggtccttcatgatcttgcggaggtgctcggccgggaggtcctgcaagcggcgaaggaggcgaagggtcagatcggaagagtgaagcgagaagggtcgtgtgagtgaagggaagcggaagcgtctcgctcgatcgactgccgaccagggcggcccgcctgacagtgctccaccaaaggcacccctttagccgcgcgtctccctctatcccgcgctgaccctctgcgccagtcctgcctctggcctcgataggcctgaacgcggccgacgcaaaaagggccgatcggacgagcaaaaactagggtggcaccacggaggtgatccctaagcccaggcgatgcacacgccgagcgacagcctctcggaaaatcccgctcgagacagttgtcgagaggcgagagtggcaagaggcccgccatcgagcgagacaaaggagggagtggcagagggaggcgaaagagagggacgcacgaccttgcccatgtcgacgcctccgccgccctgcgtccggcgggtcgaccagcgcttcgtctgcgaggcaagccacttcttcttcttagcggcaatctggtcggccgtcagccggacggggccggcttgggtagcggtgggaggaggcgaggtcgagccggtggcggcagccggcgtgccgtcgtcggtctgcatcgtctgcggcggggaggctgacatttccgggcggatcgagcgagtgcaggtcgatggccgaaggtgcttggatggcccttcttgccgattgaccgtctgctgcttgtcgatgagggaggagagggagagggagagggttggagggctgagaatggtcgagctcggtgggaaagaggcggccgcgcgatgaagggcagcgccaaaagtgcagatgcgagtgggagccgcgacggacgcgttcgcctacgcgcctggccatcgctcgcccgctcgccgccgtcgacctgcctgtcgtcgattcgctcggcctgctcacgaccgtctcttgccaagtccctgctcaagactaccggcatggcatcgacgtcacagtcacctcctccgccacctcctcctactccgccgccgccgccgcctcgcaggccgggaggtgcgcgcgtcatgacgcccaggctgcacatcccgcaggccaacgtccgttccgctgggccgtctcccgtctcgtcctatcacgacccagctgaccgtcattctaccactgtcgcaggtgccgggagggcaggtcgaccaggcgggtgaggtcggctgggtcgacgctcagggccgaccgctcgtccgccttcggcagccgcatcagcatcagcagccgtcgccgtcaccgtcgtcaccgacgcctgcgccgtcgccacctcggccgtcaccgggtccatcgcggccttcgaggccggtcctcgcattggcaggcacgacgccggcagcagtaggagcagcagcgcccgcggagcaagtcggacctcctccgcgctcgcttctcggtcggccgagccggcctgtgctcgcctcgcctctcccttcctcctcctccgtgcctggcagctccccatcgcccgcacttccgcctacatcgtcatcaatcagccgacctccccaactctctctgtcctccacgccggccccgagctcaagcgcctcacccgcgccaagcccgggcgggccctcgctcctcggccggccaacccgaccggttctcgcgagcccgttcggttcctccgcttcatcacctgtgcctacccctcgaagaccgccgccgccgacgttagacatagccatcgactcgccggcagcagtagcgccggcagcggacggaccgagctcgagtcggccgtcccttgcgcttcgcctgccttcagagggcgggtcgtcatcgaccgtcgcctcctcctcatctaccccggccgcgacagtcagcgcccgaccacgcctcgctctacaccccatctcctacgcctcatcgtcctcttccgagaacgcccttccgaccgacgccgacaacgatggcccgctggacgagcgcaccgtccggccgttcgtcgactcggccgatgccggcgcgtacgccgcatttggcgcgccaggcggcagtggctgggctgacggcggagccggaggagggacaccccgccggctccctggcgtcagcggcggagggcacagccgccagccgtccggcgaacgtacactactcccctcgagcagctcgggcggcgaaggcgcgtacggccccgtcggaggaggtagctcgcgctcgctcgtcgctgatctacgagaggcagtcgagcgggcctcgcttgcttcgaaccaacatcatcagcagcagcaacagcggaaggcgggctcaaggccgagctcgaggccatcgtcggcgtcctcgacggcggcgggcgagggtgcagcgccgaagccgttcgagggcagcaacagcagtcgcaagagtgcaaacggcggcgggtcgagcacgccgacgcccagagcctcgcctgcgcttggcaccggcggcgcgttcgtcttccctttgacgacgacgacgacgacgacggaggcggcgagcgacacccagaatgacgcagaccgctcggaccgccctcgccgagcaaacgacgacgccctctttgcctcgccgtcgtataggagtcatcggccgccgagctcggccggctcgtcgtcgacttcgacttcgtcctcgctttccggcacgaccgaatcgagcccgattggccggtcgaacaagaacagctcgcactccgctgccattggagccgctgatggcagccctccgaccgccgtcgacgaccaggacgggggcgagccgccgaccgtcgtccagccgctggcattcgacccgacccagctcgaggacctagccttcctcggcgagggcgcaggaggagcggtcacgctcgtccgatcgcgggcgaccgggcgcgtcatggcgaagaaggtgcgtgctctcgtgccaagcaggacgcgccagtgctgacttttcaaccccctgcaggtcatcaccgcctcaccctcgcccgagatccaccgacagattctccgcgagctcgccttcctctcgacctgccatcacccaaacatcgtcggccactacggctcgtttctctttgaccacgactcgtcgctcgcgctcctgatggagtactgcgagggccggtcgctcgacgcggtcgtccggcagctgagggatcggccggagcgcgggcggtcgagcgagctcgtccttggcaagattgctgtcggtgtcctcgaagggctagactacctgcacgagcggcggatcatccaccgaggtgcgtcccacccgccctactcttgctcgcgtcgcgcagggagactgacgcctctttgcgcggcttttcgtcagacatcaagccttccaacattctcgtcacacgcgacggccagttcaaaatctgcgactttggcgtctcgggcgagctcgtcggctcgctcgccggcaccttcaccggcacctctttctacatggcggttagtcgtccgcttgccttatcgccctgcgctcacgaatcgctgacgcacgtcccactcctagcctgaacggatcctcggccaagagtactcgatcaagtcggacgtctggtccctcggcctctcgctcctcgaggtcgcccagaaccggttccccttcccgcccgaaggcgagccgccaatcgtcggccaatttgacctgctcaactttatcgtcaaccaggacccgccggggctcaaggacgacgacgcggtccagtggggcgagggcgtcaaggaggttgtcgcactctggtgcgtctgcatcgttggccgcgtcctggttcgacgctccatcgactgactgccgctgtctcctcgccctctcgcgcagcctcacgcgcgatgccaatgcccggccatacccgcgcgaccttctccggcaccggttcgtccgaaagtcggccaagcgccggacgccgatcgcgaaatggatcgcccacgtctggggctgggacctgacgcccggaagcagcggcgagctttcggccggcagcgcctcggcttgaggcaacggccgtggcgcccacgtcgctgtcaccctcttctcgcgtcccacatctcgcccgtttctcctcgcgccaacagcacttgcggccaatctcatcactgcatcccttcaccgcgtcaccctttcccccgtccgccatctgcactgcacctcgcacctagaccatgacgctgccagctttctctcaacggccggccagaaggcgaagaggacggcgggacggcaatggagagcacgaaaggtggcgtcgatggcgtacaagttgagaggtcgtaggcaagcgggtcgtagagagggacaactagatgaccgtgaaggaatcgagcgccggaaagtacatctggtcgctggtgcgcgtcacgcttcagatgagcatgctgcgggcgtgctgctccggcgtgaggggctccttggcgcgctttttcatcgcgtgggcgttatggtggaagtgcgagccggcgccgatggtaatcttgcggagcgtcgggtggccagggtagaggagctcgcagagaagctagttgtcggcctgcatccagagcgggaggtggtcgaccaggtcggtagcgtagagcacgagggtgcgcaggttcgggcagaggctcgcgagggacggtctgtccggcacatcgggccgagaaagcggcggctcgttgagacgcaggtgcggcgcgacgaccgtcaggtggaggagcgatttggcggtatgctcgaggatcctcgccagtctcgcgtaccggaagggctcttctgccgctgtcaaagccaacgtccgaagcgtcaagcaggtggggccgcatcgagggctgtacggctcgtcctggtcggctacaatcgtgcccgcagagagccaggtgacattgaacttcacaggaaggccatctgtcaggggccggtagtgacgaaggaataaactcgacaaacgtcagcagtaccgaccgagactcgatgctctgccgccagcgcacgacgcgcttcctttctgcatcttctccggatatatgatggaggcaataggacgagtagagcagtggaagggcgaggtcctgatgtgggcattcgaagagaggggggacgggcgacgagaaagcaattgccagtagcagcatcgacctggagatgaggcttggtaggacgtatgtggacggcgcggcaggtttgcatgcagatcaggagcgttgcctgagcttcccgagactcggtggaccggtcgcaaaggcggcccttccaccgagaaagatcaaacggtgcgagctcgcagtcgtcgtgcacgttgagcggcgcggcgacttgctctaggatgagggcgacgatgttgagcatgagtccgaccatgacggggttgcgggccgactcggctggaggcaaggggagaaccgggaaaaaagggctcgaaggaagcgagcagggtggcggtcaggcgagaagggacgagcggcgagatcaaaggagggaagagggcgcgcagctgaggtcggcctgtgcacgaggtcgaggcagcccttcggcctctcacctcaagcagcgagtactaagtcatggtaggaatccatcagagctcttagttacccatcaaagtcaagtcatgcggtagagagctttaggtgggagccgaggtcagttgcgaagaagcacgaggctcgcccgttcagccgagcgtaggtcaacccgccgaccacgatggtcagaagcgttctccctctcctcttggcaagcaggagctcgctgctgcactcggctgacctcctgcctaccactctgctcgttgactgacagcagaggagccaacgtgaagatggtttggctcgctcgacgtcccgggctcctggatgacacgcaccgctctcctgccggcagcagctctgacagcaaccgcagcccgtccaaccactttctcaccctgctccatcttccttcaacccttctctcccgtcatgctcaagtttctccacgagttcgccgacgacttcaagcgccatccgctcgtcgcaagcttcagcgccctcgtcccggcccggctggccagctgggcgcgcgagagcccgaccgttgccctgcccgtgacgctggccgtactgctcgtctccttcgtcgtcgtgagtgcgactcagattggctgctgaaggacatcacgctgacttcctgtctctgaccactttgtcgcaggtctcccgtgctctcggtctcgtgtgtccgacctcttgtcagcctgtggctgagctctcggctccgagctgcgctgacgccttccgacccgtctgcttgcacagggcctcccggacgagcgcggcttcgagaagggcaccaaagtcgagcccatcaagtaccgtccgcctccagcggggaagcagtcgacgtcgacctcaagcggggagaggcatcagtccggcgagcagggcgcgccgtcgttcgctgaggccgtggccgggggcgcccacccggcttctggctagaccgccaacaaggtcaacaaaagccctcgggctggagatgacggtcatccagctgctcacaccggtacgggcggcgcgccgatcttggctgaagaccgtcaaggagtaatcgacccgaggccgcgcttgacgcacgagccagacgaatgaccggcgagacggacatgccgatctcgcccaccgaccagggccctcggctgtcgctgtctgggcgtgtacatccggcgtcgcacccgcattttgtctctaatgatctctatatgacctgctcctatcccgaggcgggtctgccggcggcttccgtcgtccattgcgcgtgtcgacagcatcgggcgacttgactgctcgcaagcttgctctcactcgtcctcgtgcacttcttcgccagctgccttacctcgtcctcaactgcttcggacacgcacccttcggccgacgccgtttgatctggccctgatcacgggcggcccgatccgaaagagcagggccttggcgcccgcttcgaacgcttgcgtccctctgacgcttcccgtccgcgcctccgaccaccaccttctttctaccatcgcctcccatcaccctttccagcatcgatgctcctcctccagcagatcctcgccctatctatgggcattgcgacggccctcgcttctccgatcgctccagccatcgacggtcggtcggcggccaccaccgagctcctcctgccgcagcaggtgtcgcagaccgtactcgacttgacgggcttcgctcggcaaaccgaggctgaggccggtgcgtctggcgtgtcttctcgagctgccgctagacgggcccctgatccgctgtcgcccttcccctgctcaatggcagccaaggtcggccggcagatgctggacgagcgcggaacgggaacgctggcgacaacctacccgctcgaccggaccgacggcctggccggtgagtccctctcgagggatcgatggcgcaccaagagctgaactgctctgtttgttcgatttaggctccccgctggcgatgatggaggcacgaccccgttcatctcagcccgccctgctgctgctgggccccttcccctcttccctcctgttccgcccgctcaccgacatcccgcctccctccgctcacagtaccaagtcccgcacccaaaggaccgctcggccctcctgatcatcttcatgcccatctcgcagaacacgcgcaacgtcctcgccgaccccagacggagagcgacgttcgagctgcagaacgaggcgggacgaatggccgaggagcggctgtcgctaatcggggtcagttcctttcctgccccttggcttgctattttgatctttcagctgacgagtgatgggctcctgacttgcagcacatcgtcgtcgagcgcaatctgacggccgctgacgacgcgctgtactcggccgcttacctcaagcagcagtgcgtttctcttctagtagtcgaaaaatcccctctcgtcagtcactgacggccctcccttccccctatctgcatctcagccccgacgcactcccctggctcccctcggccgtctcgagcccgcacacggccttctgggctcgcctcgagcccgatgccatcttccacgtaggcgggttcggcgacgtcaagcacatcggctacatcccgctcgacgtctggcgtgatgcggtggagcgttaggtcgactaagctctcttccggcttctccatatcctctctggcgctcactatctctcactctctcggtactttcgtcatgcgtgtctctcttctcactgtaaatcagtcagactcttcatggattctgcctcgggagaactggtcttgtctcctccagactggcgcaaggtctattcagacaatgtacgagggggcgcggggagcgcacatatggggcgtctgctcaatttgaacgatttggggcgattcagccagcactcaagcgaactgcagctaagccgacctcgacctgcccgagccggtcaagtaccttcccgaggccgtcgtccttggcagcgaaggccgccgacaatggtggcagaggggaaggaggacgttcgttcggctccggtccgtcgctccgcggctgcaggttcccacgccgatcgaaacgatctccgtctaagcttgctccgtccatcaacagcccctgcttgccggcatcttctcttctctcacaaccaccacccactccctctcacgcacactcccatccaacgatggccagcacgagcaaccagacgatgacccaggagccggagctgctcgacaacccgtcgttcatcctccgcgggtgagttcgcgcgccccccctgctcgctgtcgcttgtccgctggactggcggtacctcgcgcgtatcgtgataaagcagagagggccttccgccggcagattgtatgaggagggcctctcgcccttctcggcggcttgcaagagggacgctcgttgcatccctgcgtgccatcacggccggcccgctctctcgtccctccccccacgctccctttgccggctctccttgcctaagcgcctcgactgacttccaccttcggacctcaacacctcagcgtccacgacaccttctatgccgatacgccgctcgagcctgtcgggcccgatgatgtcctgatcgaaatcgcctcgaccggcatctgcggctcggtgcgtccgcctccctttccccagcctagcgcgcagcacggcatgctctcgaccgacgctgaccgcctttcttcttcctcaactcaaggacgttcactaccacgagcactgctgcatcggcgactttgtcgtcgaggagcccatgacgctcggtcacgagagttccgttcgttcctctacgctcctcgccctttccttgcccacctcccttcacttaagctgaccgttcttgccgcaacctaccagggcaccatcgtccgccttggctcgaacgtcagctcgcacaagattggcgaccgcgtcgcgcttgagccgggcaaggcgtgcggcctctgcccgacctgcacgagcggcaagtatgagctctgcgcaaagatgcggttcgccgcaacgccgccttacacgcggggaaccctgtgccggtgcgtcctttcgtctgctttgtgcgcttgatgaatcgagctgacgaggacttcatttgccacccgtctggctgcaggtactacactcttccggccaacctcgcccaccccttgcccgagtcaatttcgtttgacgagggcgcgatgattgagccccttgccgtcggcgtgcattcggtcgggacgctcgccaacgtccggcccggtcaggtcgtcgctgtctttggtgcgggaccggtcggtctgcttgctgcggctgtggctaaggcgctcggagcgaagcgggtcgtcgtcgttggtgcgtcccgcgtctcctctcctttctcctcctcttctcgctactcggctaaccctttgtgcactcttcctttagacatcaatcagcagcgcctcgactttgcctcgacctacgccgcgaccgacgtcttcctgccgcccgccccgcagccgtccgagccgcgcatcgagttctcgaagcgtgcgacgctcgcgctccaggagaagctcagcattcctgctcgggggccgggcgcggttgacgtggtgattgaggcgagcggggcggaggtttgcatccagatggctttctacctcggtgagtacctcgcccgcgcttttgtgctttcaactcatgacgagacaggcatctgacgctctcatctcttctgcttcgcgcccggccacagtccgcgaggcaggcaagattgttcaagtcggcatgggcgcgcccaacccccagatcccgctcggcgcctgggcagccaagcaggccgagtacatcggctcgttccgctacggtgccggcgcctggacgacggccatccaccttgtcgcgtcgggccgggtcgagcttggaccgctaattacgcatcgtgcgtcctggcgccgtccgcacaaggggtgatcttgcgctgaccccctcccgaccttttcggtctcccccctgcacctgttgcctctccctcccccttcctccacctccacagactacaagttttccgaagcggtcgaggccttcaacgcgactaaggacggaaagagtgccgacggccggggcatcatcaaggcgctcattgcgccgccacccaaataggcgtcgtccgtccgagcgagacaggacagggtggttgaggtcgccgatgtctgtacgcttgcgggttctgccatgatgagaagacttccttgggcaactgtgaaaggagggcagcgagaccgacgttcgtgcagaggctggaagcagatcggccgcccagcccggcgactcgtctcgccctcagcccggatcgagcgctgcgtctgcaggcccgtccgaccgccatccttccttactgactctgctcgtagaaagctctaccctgagatcggtcagttcatcccatccgccaggcatccttgagctctggccaggacgcaagactgacggtgacgctcgctcgctcgctcagcgcagcccgatcctcgtaccgctgcaccctccctccgacctcgaaccctcccctctcgcgacccttcaagcatctcgtcatgcgcgtcttcgattttaagaaggatgatgctcccagccaggagggcaaagtctacctcatcaccggcggtgcgtcgtccgagctttgctcgctcgcaggctaggctgacttcgtccagctctcacgtgctcgcatcctctgctcaggcaccggaggaatcggcgccgagtcggtagtagctctcgccaaccacccatcgcctccagcgcacgtctacttcaccggccgctccgcctcgcgcgccaaggaggtcatcgcccgctgcccgtcggccgagtcggtgacgttcatcgaggccgacctgacgtcgctcgcggccgtcaagcagtcggcctggaccttccttgccaagtcggaccggctcgactgcctcatcacttgcgcggggatcatggacgtcccttccggccggacgaccgagggctacgagatccagttaggtgcgtccccccttcgcctcgacgttcggcgaagcgactgctgaccctcttccctcggacgcaggcacgaaccacgtcggccacgccctcctcttcaagatgctccagccgaccctctcgaaggcccctgatgcccggctcgtcgtcctctcgagcgaggcctacatgatcgcccggggcgtcggcctcgacaccgaggcgtttaaggaagacgccgagggcaggatgggtgttggcctcagcaactacgggcggtcgaaggtacgttccaccggcgagcaccgacctgttctagaggttgacagacgagagctctcgcgtccagttcgcgaacatggtgtggggtcaagccatcgcacgtcggcaccccgagatcgccgtcgcggttcttcacccaggtgcgaggcgctacccttaccctttcgaacttcctgccgttcctgactattctctccctcccttgctcaggcatcgtccgcaccgacctctttggtcacttccccctctggaaaaagcttttcctcttacccatgtatcccttcacgatcgcccgcacccagggggccttcaaccagctctgggcggctaccgtccctcggtccgagctcaacagcggggcgtactacttgccggtcggtgaggagacggccgtctcgggcaaggcgctcgaccaggatcagggcgaccggctctgggagtggacggaggctgagctcgagccgtgggtcaagtaggcggggcggcctctgtgtctgtatctgtagcgcttcgcatttctgcaacctcgtatctacttccaatgtatggttcgtctcgctcgtctgtcgcggcgcgaggtgttagcaaagcaaagcggcgcacataccgatgtcgagtctcagtctgcaagggggacgggtcgttacttgtgctgcgcgtcgccgaccgacgctcgagttcggagggagttgccgccgccttacctctttcttcatcacagcttgccccattcaccatccgcttaggctcacagcacaggggaaatgggagctcagcagagctcgtcgtcagtcaagattacgaaccaagaccgggcgatcctcgagtgcgtccctgcccgcgcccggctctgaccgagggcgagctcgcacagcttcggggcgagctgatgcctcccgcctcaccgccagcctcaagctgcagcgtgacaagctcaaacagtaccagaagaaggtgatcctcgcatcaggtctcgggcgtgaaacgtcgctgaccggcgcttgcttcgtctgcagattgagcacgtgctagctcgtgagaaggaggtcgcgcaggaggccctcgcccgaggcgacaaggtccgctcagtcatgagctcggtcttgcgtcttcgccgctttgtactgactagcctaactggctgctccagtctcgggcgcttacggcgctgaggcaacgcaagtatcaggagcagctgctatcgcggaccgacgtccagctgtcgacgcttcagggtctcgtgcgtcgccgcccgaccgcagcccttgtactcgatcgaccgcccttgctcacacagagcgaccttcccgccccatcaggtcacctcaatcgagttctccctcgtcgaaaagtcggtgtttgaaggactcaaacaaggcagcagcgtgctcaaggagctgcagaaggagatgtcgcttgaagcggtcgagcggctgatggaacagtcggccgagggcgtcgcctttcagaaggtgcgccttcgctgtcctctcctctttgctctcacgcgtgaactgacccgctgagactcggtcggcgaatgtccgacctccaggagatcgacgaggccctccaaggcaagatgtcggccgacgaggaggacgccgtccaagccgagctcgccgcgctcatcgtactccagtcgccggcgcaagcagagtcaaaggaaccggcgggcgtccagctgccggacgtgccgcaggtcgagccggtcgaggccgagacgagtcttccggagcaggagaccgcgccgttcagggagcgcagcaaggaggagcgcgagctcgtaccggcgtagcgcgacgccgacctccttctgtactagtagagcacgaccgtgatctatgaccgcttacgacaggctggcttgatgaagtacaacatgcgtcgagccttgtacaaagaggtggaagggcgtgccgaccggccgcccttcgtttactctacgactcccgctccctcagccagtgacccctatctcgcgcccaccgccttgaatccccaggccgcgtcgtacggcagagttgcctccggtcgccatccccttagtcggcatcggacgcgaccagaaacggatggcgatattgcgcgagactgcgaagcgagcagcccagtgtcagctcttgctcgacgcggataggcggacgccgagcttacctgtgcagactgcgtcgctgatgtagtggacctgcgtcaagatgccagggtcggccgtcttggcctggtggaacgaagaagaggctgtcagccacccggttggttgtgacgagcagagatgccgacgactcacgaccacagcctggacgagggcgacgtcgtggctcagaggcggcgcatgcagggttgggccgtcctcggggttgctacttgcggtcggagcatcgtgcagcgacgtcgcgccggaatatcgtcgcagctgatgcgagaaggaccgggtcgagtagtggccctggaatcgatcgaggggcgtcagcgacgcagtgagcgtctcgggcagaagagcgtcgatgacgcacatggtggccgccctttggacgatggaggcccacgggcgagaaatcccagagcaagagcttgccgtcctcaccgacgctcgcgaaacggtagcgctccttgagaacgtcgcaccgttcgcgatcccacgcgaggccggacacgaacgagcagtggccctcgcaccgggcgacgacgcgctggtcgcggagcgacagaacggtgatcaggtcgtcctggccggcaaacaggaggaagcgcgagtcgggcgagaatgcgagcgccaaaagcccgccaaagtaggaggtgtgctggtccgagagcctgcagatcagcgggctctgcgtcagtgcttgttgagcaactgcgtcaaagaagtgtgcgacgtaccgctcgcttccgagatcaatcaggttaagcttgccgtcgtcgccgacgaggcccagccagcggccatccttgctgacctcggcgctgacgatcgcccgcttccgaacgagctcggcggcggcagcggcagcagcgccgtacgcgttggcggacgccggatttgccgactggaaaccgttctgcggcacctggaacgggctcggcccgttattgttggcgtagccggccggcggaggcgacatgatgaccatcgccggggggaaggcccgcgtgccgtccttggcctgggcagcggccggtggaggcagcttccaaacggcgaccggattccggccggcatacttgagccgctccttgtccttctcgccctcgcggacctcgttccgccacctgtaaaggcccttgctcccagcgggcgcctcggccagccaaggcggtgtaaagctcgacggcgggtcgtcgagtgcgacggagtaggtcatgatcgttccgtcagtgtagatgacgaagaagaggagcgggttagtcggatgcggcacgatctgcgtgacgggcagcggatggatgaggccggccttgttgagccgcgagtagcgaaatgagattgggtctgcaagggagaggtgtcagcggtcgctctcttaaagcgaggagacaggtcgctcgcaagacgcaccaagccagacgatgtcgcccgtcccaaagccgagaaagacatccatgcgctcgtgcgtcttgccaatctcctggacggcaatggcagagagctgctggctgaaagtgatgcgcgcaagcggctcctttgccttaccgccgagctcgacccagccgagcgtccggccgtggtgccagaagccccaagtgaccgtctcgcccgtcttggaccggttggcaagcacggcgagcgacgactcgggcgactggattcgcgtcacgaaggacgacgacgtcgagcggagcgacgtctttggccgtgggttggcgccggcgccgttcgccggacgcgaaaggaagccaccgctccggctgggcgtcgagccaagagccgacgacgacgagaggctcgtcgaagcaaacgaggacgagagcgcaccgaccgctactccgttcggtgacggcggcgcgaggaggtgcatatcggagacgctgctcgagagatgctcggagggtgcgccagacgagccggtcgggtcctcgctcgtcgtcgactcgccatcgccgctctcctcgcggacgctgctgctcccgccgaggccgaggaggcttccaaagccagtgccttccttccgggccggataccggacctcggtcagggtcatgcggaccgggatgggtggcagcggattgccagcgatcgggaccggcacgtacgtcggcagaaagtgcgtcggcgacggcaggtagaggccctcgggcgtcgtaaacggctccgggtgaaacgccggcggctgagcctggtcgatcatcgacgccatcgtgcctgaggagaagcctgcggtgatgattaccggcggcgggctgctgggaggcggcgccgacgaggaggaggacgaggcgaccgagccggcgggcggcggaagggtcggccggaagaagctgcccatggtcgaggcggccgagtacgagtgtcagtctggtaagaagaggaggaggtgcgaaatcggtagctggtactcgtcgtgagagggacgaggaggcccctgccggccgcccagcatcacatgggggcgacgtgctggctttcggcggaagctcgccggcccctcgcaagctcaagcactgccccgagttgctgctggatctgaacccgcgctcagtagggtgctggggacggacggacctctgtctgctgaggctgcgggatggcctttcgtccaaagggaaggagtggagacgaaggaggaggcgatggacgttgtagggtcgagggtcaggtcggccggcgctgcggcggcggcagggcgcgttcctcgtctgcctcacacgccagaatcacgcgttctcttagagtttgagagctgcgagggctggccgtcttctgaacgaccatctgcacgcttcgctacgaaaccctctggcaaggtaaggcacgctaggagagagaagcggcgtcgaagctgagtagcggcgagggtgggccggctgacaatctcatccgccaggctcgcggaccaacacgggcgacagggcggccggcgtcgacgagacggcgccatctctcaacggcccgttcccttcgccgtctgccaacttcgagtcaagcgacctcgcctgtcggcaggtcaaggcaaggtgcaagtacgtcgaccatctattcaggacggacgagacgggtcgcttggcgtgctggcttgcagcaggagctccagtgcggccgctgagccagccctgcgctcctccctacactgatttgagagctgacggcttgagggatcagccagcccagctcgtcaggagcacgacaagaaggacgggtcgccctcgcggacatcgccgcttctgatggtgctgctgtcgacgacttgggctcgacgacttgggcggccgccgacgccggctgattatcgagccaagtcgggccattccggccggtatcgaccgcatccgaccaagagagctgggcggcgcgacccgagtcgtggcccggcaagctcgccgatgggcggcggcctgctgcacgacagctgcgacgtcgacactcgagggcggaagctgagcatagatcgcccacggaccatggtgcgccgggctcggcgctggtggatcgtgcctgttccgacccgaccttaggccttgatcgagacgcacgcgacgaaggaggagcaaagaggtctaggattttctgcttccctcgttcgcaattggcggccggcctctgccccgtcgctgcatcgtcgttcacgctcgcccgcgtccccgcgctggctcattgtttggagagggaggcgaccaccgctgctgacctgagctgacctcgaccttgtcctctgcttcatcaacaaagggcggccgctcgatcttgtccttctctcctcctcgaggatcctccttgttcaagctcgtccgtcgcaaccggaaacggagtcgtcaaacggcggctcgctctcgacgtcggcccgtcggggcttttctcgcgttcttccgcgcgcagaagggggtctcacaacaccgcccgagggcgtgaaggctaacggccgaggcccgtccgctccgcttccgaccagctttcgatcgctgatgccctttgacgccgcccactgaaccggccacgcgaagcgtcaccggccggccgggccaaagcagctctgcgccctcctccttcgatccattcaccttcgaccggtcccccaccagctgagacgtctcggtgttcgcataggacggccacgcgactatgaggaatgccccgcgaggacgctccgttcgcaaagcgctcaagaggagggcaagccgtgcgctccctgctaccttcttttccagtcccccccccccctcttctcagccgacctcctcctcaagcagacggaccgacggcccctgccttctccttcctccgcgctcctcctcccggctggtccatatccctcctcctgcagctctccgccctcgtcagaggcgacccgacttcaaacgtcaagagccgttaggcatccgtttccttccgcccacctcgcccgccgtcaatatctccctcggccatgcgtctctcgtcctccctccttccggccctcgcccttgcctcggtcgtcaccgccagcccgtcttcgacgccgtcaccgggtgatgtcgagcagcgatccaacctttcaaagcggaactacaacccttagtccgtccagccttgtcaggcccgccgagctctcacccggacagaaactgacagatcgctcccgacctcggtcccgcagctgttggttcttctactgcgactacgactatgataacggtgctgccgaagccgctgccgcttcgagcgcctcggtcgcttccgtcgcatcggtcagctcggcatcggtcgcctcagtggcgtccgtcagctcggtgtcagtcctctcggttgcctcggtgaggtcggtcgcctcggttgcgtcggtcgcctctgtcgcttcggtcgcttccgtcgcctctgtcagctctgcctcggtcaagtcggtcgcctccgttgcgtcgcagagcgtccagtcgaccggctcggttgcatctgtctcggccacctcgattgccgctgtccgcgtgcagtcgacggcctcggttgcgtccatggcttccgtcgcgtcgctcgcttcgatcgcctcggcctcatccgcttcggttcagagcgtcctgtcggcccagtccgtggccagtgcggcatcagtagcctcggtcgcgtcggtctcgtcggcgtcggtcgcatcggtcgccgctgcctcgtccgcctcggttcggagcgtcctctctgttcggtcgaccgcctcggtcgcctcggtcgcctccgtctctgccacctcggtcgcttttgtcgcccagcagtcggcgtcgcgcgtctcgatcgcttctgtgtgagctgagcttcgcgacggatcggaagtctcgcaatcatctgacccctccgtctgacctcttagctcggctgcctcggtcgctgccgctgccgctgccgcctcgtcgctcgcgtcaatgtcgtcgcagtcggttgcgtctgtgcagtcggtctcggcgacctcggaggccattaacgctgccgctgaagccaccggcttcgccagcctcggcctgcaaaacttcatgggctacctcggcggctactgcacgccggtcttccagatcgacacctggggcggtgccacttacttcacctctggccttgctggcctccggcgctcggatgacctcctcacggccctgaccgcctcgtgccgtgaccagtacgacgcctgcgacctcaacctcttcatccgggacgccctctgtgttgaccagtacaaccggtgcacggcccaggcgaccgcccaggtcgccggcatctcgattgcctcccagtctgctgtcagcactgcgtgagtgtctcccctccttctcctagtagtgactgcggcaaagggactgacgctcgcacgacctcttcttcacatccttttctttcagctcggccggctcggtctcggctacctcggtcgctgccgcctcggctgcctcgctcttcagcatcaagtcggctgcttcggtcgcctcgatcgcctcgatctcggccttgtctgtccaggccgcacagagcaggatctctaccgcgtcggtcgccagcgcttcggccgcgtccatcgcgagcatctcgtctgcttcgctggcctcggtcgctgccattgcttcggcttcctcggcctcggttctctcgctccagagcatccagtcgcaggcttcggtcgtcattacgtcgctggccgccgtctcgtctgcgtcggccgcctcgcttctgagcatccagggccagcagtcgcgtatgtcggtcgccagcgtcgctgccatctcgtccgcctcggtcattagcgttcaggccgcccagtcggttgcctcggtcgcctccctttcgagcgcctcggtccagagcctgctctcggtccagtcccaggcgtccgtcgcatcgacctcgctcgctgccgttgcctcggcgtcgtcggcctcgatcctcagcctgaagtcgctccagtcccaagcctcggttgcctctgtctcggctgcctcgcagctcagccagcagagcgtccagtctctgctgtcggtcgcctcgctccagtcgatcgcttctgtctcgggcgcctcggtcgcggccatcgcgagcgcttcggtcgccgccgcctcgagcgcgtcggtgctcagcctccagtccctccagtcggttcagtcgcaggcttcggtcgcctcgacctccatcgccgctgtcgcctcggcctcctcggcctcgctcctgagcatccagagccttcagtcgcaggcgtccgtctcctctgtctcggccgcttccgccgcttcgctcctcagcatccaggcctcgcgctcgttggcctcgatcggcgccatctcgagcgcttcaatgcagtcgctccagagtgtgcagtcgcaggcctcggtcgccgcgacgtcgctggccgctgtctcatccgcctcggccgtctcgctgctcaacatccaggcccagcagtcacagatgtcggtcgccagcatctcctcggcctcggtcctcgccgcccagtcgcaagcctcggtcgcgtccgcctcgagcgcctcggtcgccgccgcttcgagcgcatcggcccaaagcgtgcagtcgcaggcttcgatctcgcaggcctcggccgccgctgtcgcatcggcgtcgtcggctctcgtccagcagttgcaggtttcggcgtcgcaggcttcggtctcgcaggcctcggtctcgcaggcttccgtcgcctcggttcaggccggccaggccagtgcttcgcaggctttggtcgccgccatgtcgaacgccgccgtcgcttctgcgtcgtcggcgtctttccttgccgctcaggcctcccagtcggtcgcttcgactgcagccgccgccgcctcggccagcgctgttgccaacgccaacaggcttgctgtgggctgggcctcagcctctcccaacctcattcaggaggggaccaccggtcgggctctcgacggcgacttctttgaggacgctgccggcatgactcccttggcctgcagcaccttctgctctggcaaaggcttcccgctctcgggcctcgagtactcgcagcagtggtgcgttcagcagctgtctgtcgctgcctcctcctttgtactgacccatattcactcactgaacagttactgtggctccggtctcgccaacggcgcctcgctcaacaaggtctcgtcgtcggtcacccttccctgcacgggcaacgctttcgccgtctgcggaggctacagcgcgctctcgctctcgtacgacaccaccaagcttaatgccgacctcaccccgatcggcggcatccctgccccgtcgtcggccagtgccagcgtatcggctgccgcctcgtcctcgtccgcgccggcgccggctgctaccctgcctgctggcttcgcctttgcctcctcaagcctgatcgccgagggcagcaccggtcgtgcgctcgtctcggcctccactagcctcagcgccaacactcccgccgcttgcgccgcctactgcgacaacctcggctacccgctttcggccaccgagtacacctcggagtggtgcgtttggcttctgcggtagctctttggcaaggccctggctgaccttgacggcctttctcccctttctcagctactgtggctcggagctttccaacggcgcctcgctctccaagacgtcgacggcttcgcccatgccttgtgcgggcgatgctcagcagacgtgtggcggcgcgtccgccatgactctcgtttacaacagcgccaagcttgacgccgacctctcgcccaaggccggcgttagcgcctcgtcgaccgcctcgtcagctgctgctgccgcctcctcgacggcctcggccggcgtctcctctggcaccctccctgccggctacaagtctgtctcgtcgagcctcattgccgaaggcaagaatggccgcgccctcatctcggctagcacaagctcgcagcagatgaccccggccttctgtgcctcgtactgctcgaacctcggctttggcctgtcgggcaccgagtactcgaccgagtggttagtctctgctgccgagccctcaactccctcttgcctttcgctgacttccccttgccacctctctcgacagcttctgcggcagcgtcctctctaatggcgcttcgctcgccggtgtctcgtctgcagagcggatggcttgtgcaggtgaccggtctctcacgtgcggaggccccgacgccctcaccctcatctacgattcggcccgctacaacgccgacctcagcctcatcgctggcgcccagccgtccgccagctcgtcctcagctgcgcctgttgcttcgtcggctgccgctggcggctcgatcggcaagcttcctgccggctttgccgccgcctcgtcgaacctcatcgccgagggcacttccggccgcgcgctcatctctgcttcgacctcgtcgtcggccatgacttcggccttctgcgcgtcctactgcgacaacctcggctacccgctctcagccactgagtactcgtccgagtggtacgtctcgtctccatcctagctcagacatgaccgtagcttcgagttaaccttttggcccacctcaccagctactgcggctcggagctctccaacggcgcctcgctctcgaaaccttcgtcgaccgccggcatgccttgctcgggcgagccatcgagcatctgcggcggcgcgtctgccatgaccctcgtctacaacaccgccaagcttaacgccgacctctcgcctaaggctggagccggtgcctcggccagtgcttcggcctcagcctctgcttcatcgtcgtcggccgccccggcgccggctgcctccctgcctgccggattcaagtctgcctcgtcgagcctcatcgctgagggcacgaacggtcgcgccctcatctcggccagcacgagctcgcagcagatgacgccggccgtttgcgcctcgtactgctcgaacctcggcttcccgatctcgggcaccgagtactcgaccgagtggtgagtcgtccccgtcgctgccctgtctccgtccctgcctctgtacaggcgacaatctctgaccttcacatctcttccctgacttccagcttctgcggctctgtcctctcgaacggcgcttctctatcaaagacgtcatctgcgcagcggatgtcctgctcaggcgaggctgccaccacttgcggtggccccgacgcgctctcgctcgtctacgacagctcgctgctcaacgccgacctcagccctatcgctggcgccgctccggcctcgtcggccagctcggccgcccctgccgcctcgtcctctgctgccgcctctggcaacgtcggcacccttcctgtcggcttccgatctgcctctgatggccttgtcgccgagggctcgaacggtcgcgctctgaccggcgcctcgaccaactcggacaacatgacgccggccgtctgcgcttcgtactgctcgaaccttggcttcggcatttcggcgacggagtactcgaccgagtggtacgtcccgctcgctcgaccgccgttgtccttgaaattcctaacctctgtctttgccgtctcctagctactgtggcaataagctcgagaacggcgccgctctcggcaggctctcgactaacggggcaatgaagtgtgccggtgaccggtcccttacgtgcggcggaccgtccgccatgaccctcatcttcgactcggccaagttcaacgccgacctcagccccattggcggtgaggccccggcctcgtcggctcgcgcttcgtcgtcatcggcctcggctgctgccgcgtcggcctcgtcctcggctgcccccgccgagtcgtcatcgtcggccgcccccgctgagaagccgacgtccggccccgtcacgctcgacaatggcttctcgagcgatggcgcctgcagtacgtctctgtctgctcgtcttaggtcgggcggacacctgctgactgggcgccttttttcacagtcgccgaccgcgacggccgcctgctcaataaggcctcgctcaactcgaacaagatgacgcacatcatgtgctcgaactgtgcgtgcagccgatgactctttcaagaggcttcctctgaccgacccctcttgcatcttcagtctgcgccgacaacggctacgcctacgccggagtcgagtacggcagcggtgcgtctgctttcagcttctgcggtcttccaattggcaatcgctgacctccttcgcctcgttccgacagagtgctactgcgacagcgaggtgactgtccgcaacccgtcgacccagtgcaactctcgttcgtcccccagcttgtcttcgaccgcgcatcgctttcgtcaatatctgacctttcgtcccattgcagcttgcgccggtgacgcttccaagatctgcggcggagggcaggcgctcaacattttccacaacccggccatctctgcgaccccggcgccgctctccaatggctggaccaacaccaagcgatgcctactcgatggacagaacggccgcctgttcgacgattactctgtttcatcggacgcgatgacgcagcagctatgcacgtcgacgtgcgctgagaagggctttgaccttgccggcctgcagtactcgagccagtggtgcgtcgcttcgaggcccccatttctgtccacgcaggaactgatcagcttcctcactcaccttctccagctactgtggctcgtcttccaaggtcgacattgccacggccgccacgtcgacccagtgctcgatggcctgtgcgggcgaccagggccagctttgcggcggtcctaacgccctcaccgtctttgcggcgggcgccgccaagcgcagcacccgccggcgcctcccctttgccaagcgctagacttcctctgtctcctcttcctttggaccaaccttccatcacgctcgttacctccctctcttagctgtccgcccgcagttctcttcctccttcgactagatgcagcctcgtctgcgccgctcgggcctgaccgtccgctcctttactcccgtctccgtaccccctttacctttgcccttgcccaatccccctttacgcggatgtaccaccactcgcctcctcgctcttgtcgcattattttgccatgcttcttcaagcatctttcaagaggtctcgagatcacagcccgagcaagcgaggtctgcccgcaactgagtcctcagactcacccgcctctcagccatcgagccggcgacgagagagactggaatctagagccagcaggcctacatgcatagttcccctttactctgctgctgccgacgacgcatgctcgctcacccactgctcgacccaggccttgaccttgtcggccgcgtcctccatctcggcgtgcgtattcgacgggagctgaacgacaatctcggccgggtacgactcgaaggcctcggacaggcaggtctgcatgatctctgtgggcggcgcgcggggtgaaggttagtcgtggcgcgctgctcttggcgattgacaggggaggacggaccggcgtcgttgttctcctgaatcttcttgagcgagtacttcctgcgagtggcgacgagtagagtcagcgagccagcccgacagcaaaggaaggacgagagggaacgcacctctgctcgagccggtcccagaggacggtgtggtcgcaggtcatgacgacgacgaggtcgacccagcgttccgggaagaggtcgcagccgtggtggtcaagaatgacgccgcctttcgacagctggtcctcgtcatcgcgggcaggaaatagcggctcgagcgcatccaacagctgggcggcgcgcgcgagaggaggaacggtcagttgcgaggtcgactgcgggcggcggcgacatgggccgagcgagtgagcgcgcccaaacagatgcgcaccttgtcctcgtcgacgtcccagcagtcccactcgtcgttccagcccgagtaggccttctctcgcttgacgacgtcgccaatgttgacgtgctggaagccttcgggcagcgtctcgagcaggagctgcgagaaggtcgtcttgccggtgccgggcgtgccggtgacgacaatgttggggagaggcatgatgggtggctgcggtaacggatgctgttgatctaaaggggcgagtgtcaaggtctgactgaagggctggagaggctaggcgcagctgagagtggatgagggtcgacggctggtcggcgtctgaggcggcggaccaacgcccaaatccactaaccctaacccttcgatcgccccgccgcctcccgcgctgcgcgccagggggaggggcgccggggctgcggacgatgcgaaagggtggctcgtcagcgctggcagcgaagcgcaagacagccagtggtcgacgtacaagccagggggcggcggccggaagcccatcggcgctccagggaagccaggagggggcgctccgggactatcacaagaaagcgaggaagagcgcgataggtcagcgacgttttgagcgtccgcaagctggatgtgtgtgctggtcgacgcacaagccgggcggagcggcacccatcggcatgccagggaagcctgggggaggacgagcgtagggcatcgggcgagcagcaagcgaaggcggcgccatgccgttgagaggcatgccgcggccggcggcgagaccttggccgggtccgggaggaagctgtgagggtgctcggccagacgtcagcgtcctattcgagagacccgcataaatggccgatgacgcacaggagtcgagtcctcctccttgcgaggcggagggccctcgatggcgatggagacgacggtctcgccccggaggatgacgaggccgagcgtgcgcttctgctcagacggcgccgacgcgctggcgtccgtcttctgcttcttgttctgagtatcccgcaagagagggttgagtcagcacagcacttcctcgtgagaggtgagcctgagatagagggcttgaaggcgcctgaggggagggtctccgcaaggcacgacgtcggcaagactcctgaacctggcagctcgctgcaggtcaccacagggcgacgtcgtcccgtcccgaaccgcatcctcccccttgaaggccttctgggtgcggactaggagcaagatgagcggcccttggcagacctaggtctgctcaagagggcgcctgaccacggccgagggagtgacagcaggaaggacgaggtgggctcaccttgatcttgcggaactcctcgcactcggccaggacgaggttcatgtgcttgtcgaatgcaagcatttggccaatcaggttccggccgtcgttcctgagcagagagacgcgtgtcagctgtttgtgacactcggatgccagtggtcgctggcgagcatgcagggcgaggcaggctgaggccgcacagggtaaccttgagccggtagttgatgagcgacatcatcttgccgcccttggccttggtgtttccgactgtgccggatcacccggaccatagcaaggagcagaagcaaaggcagcggtcgagccaggtcagcttggatggccaaggctagggacgaggtcgcgacgacgcaccaggctggaggagagcaatcagaggagaggcagacgaggacgacgggaggagacacgaagggcatcagctgaccggtcggacacgagagttttccagcgactcccagataacagactgaccatcttgacagagtctgcgacgagagagaagaggaggagaaggaggaggtgcgtgtggttgagctgctggttgtcgcgcccgtcgcatcttgggctcgcagcctctcgcgcggccaagcggcgtcttcacctttcctatttttcgcaagcccctggctgcggccattgagtcttcaactgacggacagggccaggttgcacgaggaacatcgaggctttgaatgttaatctcatctagagtagaagagcaacgccaggatggtagccaccagcgcaagcagcccggcaaacacccgcatcgagccgtactcgccacaggcgccctcgaggacgcccatcccgggcctgaccccttggcctcgggcgatccggcccatctgccagtcccaccagagcgtgccgacaccgccgccgacaatcttcacacgaccaccgagcgagacgaggccggaccagaaggcaaagtgggcgatccgatgcgccgggacgtcggccggcggcgaggcgaggagatgagtccgcggcaaagcgggatgcaagacggccggccggccgaagccgagcaagtcggcggcgggtgatgctgggtcgagggctgcacagagagctgcctgggtccggagcgagccagagaggaggacaagcgcgtgggcgggcgacggcggcgagagagcgagcagcgcgcgcgtaaaggtgaggaaggcgtcctgcggtcctgccgacgacgcaaagactgaaggagagacctcagtcgaagatcaaattagaggagagatcggaacgcacctgggttggcgtagctgccgcccgagacctcgacaaagtcgtagccctcctcgcgctcctcccggccgcacttgacaacgacgcgcatctcgcgcgcagcgatgacctgcttcatcgcctcctccggctcaagcccaccagcgatgaagtcgccgcagccgagcttgatgccgacggtgaagccgggcgacgtcgccgaccggacatgaaacagaaggcggcgcaaaaggtggtgcgcgtgggccgggtcggccggccggagggagaatgcagacgagggcggtcggtggtttgacagcggcgagagaaattgtgcgacgaggtctggaggacgccatccaaagtcagcgctgcgagtcggctatgcgcaggcaaggggtgcacgcacacccgtgcgcgccatggagttcgacgccgtcgaagccgcacgtctcgaggaaggctgccgcctcgccccacctccggcagagctcttcaacctcccggtcctccatctcgcgcggcgtacgaaacgccagccgacagaagagccacgaggcgacgctgccgggctgcgcgttgacgcggatcggagatggcgctggcggacgagctagtagcggccggcacgagagcgggctctggcggcctgggtgatttagctgagcgagcaggagcggtcgggaagcggtcggacctgcaatgtcggcggcctcggtagacgaatggaaagcctggctgagcgacgcccagggtcgcgtgcgctcgtccgagtcgacccgcgcagctggcgggggtgtgaggttgtagggcagccggagatcccacggaaggctgctgtaccgggggtcaacatgtacgttgcctgtaggagggcggttagatggcgaagtaagccgtagactcttttgcgtaagggcagtcgggcgacagaaaggggtcacagcgtaacgcaccggtgatgacaatcgcccagccaccttcggcccacgccttgtagagctgttcaaacgcgggcaggtttatcttgcccccgtagtgagcgagctcctcagccatcgacaactacaaagggtcctctttaggtcagcagcttatccggcaagcgctgacgaggacaggggctcccgcgcgaaccttgacgaggcggttgcggagggtgcggccactgtgcggcaggatgagctccgcgccaaggcgattgaccggtgaggctgaggcgtcctgggcatcatgcactgttgtgacgtcggtctgagctgtcgggatgggcatgagcaggtcagctcgtcgtccgaggtcggagggacgaacacgcgccgcctacgcgcgcgaccgacctcggcttgaccaacgcacctcgcatgaccgcttgtccttggagccttgccgtcatcgagtgcagccgggtgcccttcgtctatcgtaagagcttcgagcgaggctgcgaagctggcgagatgatcaggggcaagaggtcgggccgctccgctgcgccttcctcctacgccgccgccggtgtcctttttcgggcgtggcgtcgggagtagtgacctcaccctcgagctcctccccaccacagctctcctcgaccccccagcatcgcaacccacaccacgcatcctacgattctctagctgtactctcattcctgaacacccgagcctccttgcatgagccttcccgcccacctgttccggacgatctcgcgccggtccgccctcggcggcgggccgcgtgccttctcgtactcgccttctctcctcgtccggccccagaacccgcccaagaagctctcgcccgacgtcaccccggccgctactgccgtgccgccgcaggacccccgggcggcgtcgccgctcttcgatccgtcgacccaggcaacgccgccgccgctccagccgtttgtgcacccgggcaaggcgacgacgcctccgacggccaccttctccgagggcgctgctccctccacctcgactcctgaggctgcctcgccgcctcccacgggcgctgatgccaaggcaacgccggccgctgtcgaggaggaggttattcccgaccggcccgatctctcgatgctgccctcgctcgacgtcgacccgtcggcgctgccagagcctgctgccgagggcgaggaggctggcaagccgaccggagcgaagtcctccaagcagcagggtggcttcaacacgtttgacaagctcttccttggctcgctcggccttggtctcgttgccggtgggtggtacctcggccggcctctgaccgatgaggagcgcacgaagctcaacctcaaggtgcgttggcgggcttgcgcaagtggaatgccgggcttgacgagcagcgactgacatcgggccggtctctttatgcagcccgaggacgccgagccgtcgctgaaggaccgcgccatgtcgaggacgttcagcaatttctatgtgcgtccgctcgacccagctgattgaaggccccttggcgctactgcttgcaggcagagcgctgacgatcgcctctttgacgtctgctcccacaggtccagtacctcactgagcctgcctggtcagagcttctgccgcctccgatcccgccgatccggccctacacgctcctcgtcgacctcgaaggcatcttgacgtgctcaaagtgggaccgcgagcatgggtggcggacggccaagcggcccggagccgactacttcattgcgttcgtcctttcctgccgctgcgtacgctaccgcttccgaccgccgaggctgacacatgccgaccctgcagctacctctcccagttctacgagatcgtcctcttcacccatcagccctcgatgaacgcaacgccgatcgctgagaagctcgacccttatgccgcctatatgccttaccggctgtaccgcgacgcgacccggctcgacttctcggctggcggtggtggtgtcaccgttaaggacctcaagtacctgaaccgcgacctaagcaaggtcatcatgctcgacacgaacccggatcacgcgctcgcccagcccgacaacgcactcatcatccccaagtggaccggtgacggcaacgagggcggcctcgtcgccctcattcccttcctcgagtgtgcgtcttgcgtgaattgctgctcgctgtaaggcagctgctgaccttgccgtctgcggccccccctccccagccgtcggtatctaccaaccgcaggacgtcaggccaattctcaaggcctaccagggcaaggatgtcgcggccgagtacaacaaggtggaggcgcagcggcgcgagctcgagtacaacacctgggcagcgacaccggcgggcaagcgggcgatcgccaagggcgaggccggctcgacgggctcgtggtcgctctcgtcgctcttcggcggccagcctccggcgccgtcgacgcttaagcaggacaagccgggcccgccgccgtcgtacctcgacgccaaacgcggccaggcccaggccatgtacctccaggagcagaagtactggaaggacaacgaggccgagataaagaagatgatggacgaggaccgcgagcgccagctcaaagagatgggcggcggatctgtgctcggcatgctcggcgcgctcagcggcgccggcggcccgcccaaggccgacgagcagcctcccgcggccaagtgaaaggatggttgcgggcgaggaggtctcgttactatcgatggcccctcttctcaccgtctcttgctgctctcgtcgacccggtctgctcgcggctctggaaggtttgcagcggtcgcaagagggctcggttacgcaggctgacttgcgcggcgcgtcgagcaggcaccttgcccctttctatccagctaggcacccagggtttggcccgcctcctctcccgacgcgatgtctggaggctcgtcgaacgagccgacctcttccctcgatgcgacgatcaccgcttccccttgcctggcgcagccactttctcttgacactgcctcaacaactaccctcaagctcgacagccacccttcactctttcgtccgagctcgcatctggctggcccagacggcgctccactcagtagcaacagctcgacagctcaggctggccgcgtctgccttccttccgaccctccccccttcccttgcgagccagcctacctctcgcatgcgcggcccctacgctgacgtcgtccgcgtgctggtattggcgctcctcctcgcgtccgtcgcctcggcatctcttcacagccgccgcttgcactcggcagctcattttcgacgccttcgagcggcgggctcttcagccctccccgcaggcgaccaagagccacctcagccggaaattagcaccaccgaggttgagctcgacggacgacgcttcatccagacggtcacggttaccaagacgtgagaccaacttcttctcttcgccccgccaagagcacgactaaccgtttgtgcaacgcgtcttgcagcgctctaggccaactcttcgagacctgccggtccccactcggcatcgacgtcgacgacctgtcggctagcgaggccaatgcccggacgtgcgccatccggctcgagcccagcggtgtcgatgaagaagacgcgtcgctcaacttgacgctgtcattcaccgtacgtcgtgctcaggtgttggctcagtgacgcccacctcgcgtctgacctgatcctggctcttcgtttgcgccaggctacgttaacgacgactgctctctcctcgtcggtagttgtctcgccatccccacacagcgctggtcatagcgtcgtcctcaccgcgggcgtgctgaccacgcccgagacatcgacattcatcgtcccttccaccacaccgtcagccaacgtctcgctgctgctggcgcctgcagctacagcatccatcgctctgtcgagcgacagcctccagacagccgccctcgctccgtcgtcgacagccgacccggccgtggcccttcctacgtcaagtaacagcacgacgctcgccggcgcagccagcagcgaggccagcttggccggcgtctcgtctcagccgacagcgacgagcctacctctttcgtcaaccatcgtgccggcggcagcctcgtcgccaagctctcctctgttgccgagccccgaaccgaccgtccttccgacttcagcctcgccgacaacctccgctcggccaacgctattggacaacaactcgacgacgtccgccttgaatccggcaacgagctcgacaactctgcatccgttactcgactcgatgagcttcgccactgccgccccagcctctacaacagttacttcagtgacatttgaggcagctccttcggccagcgctgccctcgcgtccggtcgcatcgacaggtcagcagcatctttccctcttctttctgagcgagcctcagctgacgaggagtctcctcacaagctcgtcgaccctctcatctcctgctgcatccacttcgacggccatgcccggaacgcaactccaagtacttgtcagtgcgcgctgagcctattgacaacgttaagcgacacggcgctgactgtcatttcctttgcagccggtcggccttggcgtcttcgctggcgtgtcggtcatcgctctcgccgtcgtcggtcttgtcacctacgagcggcgcaagtaccgcaagctcttccggtcgcggagagacgctgagcaggcaggcctgcaggacgacgccgaaatgggcagacggccgccgggcttcgtacctttgggctgatcgactattgacgactgtcgcagacctcacttgcagctcggtgatccctcatcataccttcctccttttgcaattcccgccccttcgtttcaaccaccctccgatgacgaaaccgtgcgcggctgggctgtctcctgctcgcccgaagctgctgctgctgtattgccgccatttaacgatgcctctgaaccacttgcgttctgcctgacactttatggaaggcacggcgcaagcgcgttgcgatcgcctggcaagaagtgcgtccgaggagagcggttggacgcgccgggacgtgctgcgcgtcgtcttgccttctcctgccactgtacgggacgctggatgagatggagcgcggcctgtcgctggcgtgagtagtggcctccgctctgcacgcgctgcttggctcgtcacagggcagcgcgagcgactcgtcgccaacgcctgcaatgggctcagggcgcggtgggccggcctgtgcgggcgacgtcggtcgaggccccgcattgccgaccttctgccatcttcctggctcgtcctcccttcgcctaccgccgcccctcagacgcccaccctcccctcctgccgcccgttcgagccatgtccgacagctcaggtcttcttctcgtacgccccttcctccacagtcttccttcttgtgctgcctctcggctcgacctgacgcgctccgctgccgtcccctgctcgcgcccggatgaactccccggcgaccccgtcggctcaggttcgttcttcgttcttcgttcgcctggttaggctatttggccctccggactcgggttgaccgagctcgccctgcctgctttccttccagtgcccctacaccggtgcgcatctgcgccgccaccgacgcctggcagcggcagcggcggtggtggcggccggccttcggctcggctcgacggctcagctctaatcgactgcggtggctgacgttgagctcctcctttctcgctcgtccagcttcgacctgccctcgtacgttgccggcgagctgagacaggagccttcatcctgccaacacctcctgactcgacctcgctgcgtctttctagtgctcgcaccgttcgcggtcaacccgggcgaaaccggcgggttcgacggcgctccgtcagcttccgcctgcgcttccgcgcacgcatcgcctgcccctggcacgatcgctccggaccagcgtccgacctactctgatcagcatcagcagcaccagcgatacgacgaccggccgtatgtctcgagtcaggtgatgctttccggtccgaccgatgagccgtcatacggcggcggctacgacggctcagccgcgcccaccgtgccaatccaccgcgcgcggccgtcgaaccttagcggccggcccgcagatcgctctcaccaaggaccatcgtcgtcgtcctgccagccaggccagtgcagcacgcccgatacctgcaatccttcggggcagtcccaggccgtaccatcgctgcggtcggcgtcaattaatcagcagcagtgggcgtatgacgatgcgcagcagcagcggcggcccgggcccggccggttcgcctcggccgactcgaccctgacgcaggcgacgaccaactcgtccgactactcgaacctcggcggcggcggcccgtttgatggccagcaaggggggacgccatcgagcgacctcatgcactcggctgccattcagccggtccaccttcagcggcctgtctttggcgcgccctcgccctaccagacgagcgagtacggctacaacgacgacggccggtcaagctacccgtccctctccggctactctttcccgctgccatcgccgctgcccgaccttatgccgccgtcgccgcaagcgcacgggcagcagccacaggagacgcagcggcggcctccgactcagcagtcgtaccggcagccccctccgacgaaacagccctcttacggctcgtacggcacgtgcgacgtcgaggatctcgttggcgggcgggcttatcacgcccagcaacaggccgagcagaagcccaacctcggtcgtcttgatgcgatctacggccccagcccgatcctgcctccgctcgtggccagacgcagcggaccctcagtttatacggctccgccacccgtcctgccggtccagccgttccccccagcttcgatcacggcaatcgaagacgctccggccgacgctgcgagctcgggtgagcagacggccttcatctcgaagctctggcacctgctcacgcacgccgagtacgagcgctaccttcgctggaacaaggccggcgacgccttcatccttaccaacggcaacgaatttgcgatgaaggtcctcccacgctttttcaggcatagcaaccaagcctccttcgtgagacagctcaatttatatcagttctcgcgcgtcagcacgatccacctcttggtacgtccgaccgctcgataatcattggctccctccaaattgactgctaatgacgcttcggcccgcaggacatgaccgatgccagcacgtcgacctcgatcgtgccgcaagaccagtccagcgcaccagaccacgctcaccacgtccacggcgactctgactcggacacggccagctcacactctggcgagggcgccggacacgctggcccggtcgagggctcgatcgctgcttccggtcggtcacgccctgtgcgcagtcagctcggcgacacgcgctgaccaggtctctcgtgctacctgcaggcttttcgcacccaaacttccttcgcggccggccggacctgctcaaggtgcatccacttgcctgcgacgcaggcatcatgcgctgagactgactggctttcatcggccacagctgctcaagccccgaggcacctcgaagaagagcacggcgagtaagaaagccagcatggcggtcgctgccgagaaggccaaggggtcagcaggcggcagccgccggggcaagtaggcggaagcagcctttcacgccctctgaaccctccctcatctgcccctcaaaaggatagccggctgcaccgctgtctgtgccgcctcgctctcgctccacaattcacgtctcgccacgaacgctttctctcctcacgcatctcactcgccctcacccctcctcatgctcgccgaccctttgatcacctcacgtagatttcttgtaccacctcagccaaccaatatgtaccatgcctcgcgactcccgtacgctcgctggattgttgatattgggccatccagttgacatatatcggtggcagctcctcctcagatgctgagaaggctagccgtgacccaggccagacttggaatttttgacgatggccatgacactgccgggaggggatggttccgtcagcggttgtttggtcagcagccgcgcagagatgaattgatggactgaggaaaggacgcacggcacggcgaggccaccctcgctcttgcctatccgagagccctcggtccagcccatcttgctgagcagcttgtggccgaggttgtcctggccgagcatcttggcgccctcgccgacgacctcgccctcacgccgcttggcaaggtccttgccggcgcctccgccgcgcgtgccgggcatcgtgtggttgcccgagcccgatttggccgaccagctcgcctgagcaaagtacgacgacgactcgagccggaggatgcggccaattttggcccgattcgggttgaggccagaccggctcgtcttgatgagcgtcgtgaagcgcttgcggccggcgcccttgctcgcgctcttgagcgagtagcagtcggcaagctcgtggacgcgcttgcgcgactccttttccatcggcggcaaactcattgtcgtcttgccgaggtcgcggaggaagtgctggatctcctcgtcaagcaggaccatgttggttatgcccgaccggtcgcgtttgccgcccttggtgatggtgccgatcggcggcggcgaaacgtcgccgtccgagtcgaagtcgagttcgccgtcagtcgccgtccaggccgacgtgaacggctgcttcgagcgcttggccttgttgcggctcttcttcgactttgacgagtacgggtcgagcagggcagcgagccgagcctcggcccgctcgcgcttcgcctcagcctttttcgcgcgatccgtgtcccactgcgcgagcaggctggcggggattgcagccttcttgctcttctttgtgatcggcgcggctgatcgaaaggagaggattttgtcagcaggcgacgaaatcgagagccgtcaatctcaatcagcgagagacgcaccaggcgcaagcgcatcctcgagatcgtccatgtcgccgagatcgccaaagtcgccagattggatggcgcgaaagaggcccttcttggcccggcggccttcgctggcggcaacctcgagattcgcttcgagcaggtcctgaagaggtggcgtcggaagagatcagcgaaagtcgagcttctagcctcggcaaacgcacctggatgaactgttcgtcctgatccgcccaagagaagttaccggcgaacatgccgtcggcatcctcgtcctcctcggtgtcggacggcgactgacgacctttgcccttcgcagcagcgcgcgccccggccggcggcggtgcaatcgatcgtgacgtcggctccttcgggaggggtttggcgcgagccgaagccgagcgggcgatggcagcggcgaggtcgtcgtcgtccgacgagtagaggtccatgtcggagtcctcctcgtttgacgtctcgtcgagcagcgcgtcaaggaatacctgatccgagtcttcctcctcaccgtcgccactctcggacgacgactcggcgtcgtcctcttcggccatcatgacctcctcttgatggccaaattcggcctcagagtcgctcgagtcgccgtctggcgcctcatcgtcggtcgcccagccggtgccgcccttttcgtcggtgtcaagagcggcctggccgccgtcggaccggctgctgccgagggacgagctgctctcgtagccgatggcgtcggcggcctcctcctcggccatgaaccgctcgacggcgatgtcgcccatcgaaacttgaggcgcgttgttgccggtgccggcaaggaactgctgcatgccttcgtcatcttgctcgccgtcgctcccgcgcgtatttgcgatgtaatcggcgaggatctctgcctcacgctgctcctttgcgagcgccttggcgctcttctgccggccaggcttgggtggcggcgggccgtcgtcaccccagtcgaggtccgagtcgccttcgcgcggctctccctcgtcgtcagacagagctggcccgcgcatccggcgcgactcggccttctggccgcgccgcgtcttctggtacttgctctttttcttgctgtggtttgacgaggcgaccgagttgaacgagagctcatagtcgtcaaagactggccgggcggttgaagtcgaggcgcgagaggcggcaatagccgaaggaggcacgatcgccgggttcgcccgcagggccgaccgggcgttcttctttttgttgggcgggacccagacaatctgctcctcctcctcagccgcccgtgcggtcggatcgccgaatacagggccggcggtcgctttttcggtctcgacgagattgacctcatctttcggctgcgatgaagccgagtcgacaaagaagagcggcgacgcctccagctcggggccaggagcagccgtctcggcttcgacctcaacttccagcaccggcagcgagggcgccgagtcaatgtagaagaggggcgaatcctcggccaccggcgcctcggcaaggacgtcgtcctcgccgtcaagacccgactccgagagttgttcctcgacgatgacgacagcctcgacctcctcctggacgatcatcggcgccgcgtccgaggcagtctcggcctcgagctcaccctcctcgagctgcatgtcgagctcgagcgagatctcgacctcgttctcgtcgtcctcctcgaacgccatgttgcggagagctttgtccatgcggtccatctccgagtttgcgaacgggttcagcggcgcagttgccggcgttggcgctgagtcggacgaggatgagggcgatcggccgtgaacagcagcgaaggagggcgggaaggtcgccggcaggtgtatcggctcaggctcgatcgactcagggaataccgtctgtggttcgtcgacgacgggcgtgtgtgcggctgcgcgcgcagcggcgaagggcgagactgtgaggcagacaaccagacggcacaacagtgtcagcggagagggcacggaccagttgctcaaagacgaacccttgtcggcttcggcggtcgcggcgacggtgacctcgccgtcattgaagagcgtgccggccttgacaaagatgattggcttcagcaggttgggatcgctgccgccaaagccgcgccggtcctcccatctcggcttggcggcgccgatgccatagtgtggcgtcgctgcacccgacccgccagacggagactggttgtactgcgaggcgtgtgcgaggtcctcgtcggcctgcgccaggcgataggcgttctgcgggttgccgccaccgcgacccttgccaccgcggccgttgataaagaacggcatcggactcggcggcccacttcttcggccgccacggccccggccaccgccaaaggccccccggccgcggaaggcagaagggatggcaggcgagttaggcgttgcgctgcccgcgtcgggcaccgtgcgcggaaagatgcctgcggccgaacgtgggggtaaaggtgtggcgatctctgcaggcgcaggaagcaacaggccgtcagtcccgagcgagtagcaagatatgcattcggagcagaagcacgtcgaccgcaccccgcacgttgaccgcatcatagtcgagagcgaccgccgtcatctggacgagggtgcctcctcccctgccgcgaccccggtagcccccttgggcgccacgaccgcccctgcctccgcggccgccgccaccgcgacctgcgccgggcggctggctaccgagtccgcgtcctcctctggccatgtcgagcctggctgctgtttctgtgtggttcaggcgggcttgagagatgtctagacggatctgtaggtgttgagggcgatccgatggctctgttgctggtgggcgtcggtgacgacgagctggcggcaagctcgtccggtgtcgaagcccgactctctcgacctgtcgacaccctcccccgcctcgacaggactttctctctctgcaagcatgctgctcggtcgacttgcgccggcgctcctggccatcgtcctgccgctgctcgctcaggcagatgagctgcggcagctcacctcagacacctttgagagctcgattgctcgcggacaatggtcagctcgcgtccgagctcgcccgcgcccgcccctgttcgtgcagcagctgactcccggtcgtcttggtttgtctccaggctggtcgagcactacagcccgagctgtacgtctaaaactgtgacgcttgagctcctaggcttgtgactgaattgagatgcttccggcgataggcgggcactgccgggctttcgtgcgtcctgctcgactgctgtgcgcgcgatgatctcgcctcccgcggctgacttcgccccttacttcgcaggcaccgacgtgggaaaagctcgcgggcgagaacaagtggcgcgaggaggccaccggcttccacatggcgcaggtcaagtacgtctaggcaacacttgccgtgctgcggcagcgcgcgtgcgcgcacgcgttcggtgctgacggccgtgctcttctgctgctgctgctttctcctcatagctgcttagctcagggcggtcagtcgtgtttccgatggctagaagctgtcgccaactgactgactttcgataccttggatagacctctgcaactcgaatggcatcactggctgtgcgtcgcagctgctgccacccgtcgacccctcatgccacattgctgattacctcctttgctcctaatcgaagacccgtcgatcaagctgtatcaggacggcaagctggtcacgtcttactcccagtcgcgcgacgcaaaggtcgtccaagccttcatcaccgtccactcgatcgagtactcgaagcgccggcccgacgacggccagagcgccaatggcgagcttcacctcggctcaggtggcaacggtaccgtcgtcagactcgaccgggccggtctcgaccgcgtcaaacgggagggcggctttgtcaagtactttgcaccttggtgagtcggcccgccggctgctgttccccttgcatccctgtgctcgcgtctgacgcctcgagttcatcttgccctctctcgcccaaaggtgtggacagtgagtacggcgtctaacgctgaggcctgggcccgccattcagacgacgctgacacgctccgctccgatcatcagctgtaagaagctcgcaccaggtacatctgcggcggccgctctccagctacgcgctggcgactgacccaaggctttcttccgccacgctcagtctttgctaagctcgcccagaacctcaagggccagatcccgttttacgaggtcgactgcgaggccgacaaggccatctgccgggccgaaggcgttcctgcttacccgcagctcatgctgttcgtcctccggccgggctgccttcagcctgctttatgctgacccaagacatctggctcggttcactcagctatgcgaatggtcagacatacgagcacacgggcggccgctcgcttagcgcaatgacgaagtttgccaagaaggccctgaccacgtgagtccaagtggcacccgcttgaccgagcatctgactgctgaccctgcggctcgtctggcagagggtcggctgagacgatcaacgtcgaagacctcaagaaaatcgcccagcaggaggacgtctttttcgtttacctccacacgcacggcgcaccttcgacggacctcgtgcgtcaattcagactgaccttgggatgccgaggctgacggaacgctcttctgtctgcctccaggcgctcgtcaccaaggcgtcccaggcactcctcggctccgctctcatctatcagtcgcaagacctcgacctcttttcctacaccggcgtcttgccgacgagcggctcgaccctcctctgcatcaaggaccaccaagcccggacgccgatcgcctcgctcgccttctcggctgagaacgcactgacgcaggccaacgtctcgcgcttcattgaggagaacaagctgccgaccgtcgtccagctcgctgccggcaacttcaaggaggtcatgaagaactcacgaggctcgatcgtcgtccttgccggcctgacgacaaacgacgagcgcaagctcaaggacaacgtcgctctcctacgcgacgtcgcaacagcctggcgcaagggcggccgcaaatttgagcagggcgtccactttgcgtggatggacggcaacaagtggggcaagtggctgaagcagaactacgggtacgtcgcgtctccccagcctgagcagaccgatgctgactctcgtccgagtccttgccgcattcccagcatgagccgctctgcgatgccgcaggtggtcgtcgccgatccgattgtgagttttgcggcctggacctgccttcatcagatgactgacgccccccctcctcgcagaaatcggagtactacgatgtcacgctcgagatcgaaaagctcgagttcaagggccattcaatcttctcgacgctcgagggcgtctttcaaaagacgctcaagccaaagacggtcgagagctggcccgaccgactctcgcgggcgatgtcgatcaagttcagcgagtggcgtgtgagtttggcaccggcgcactcgcagcgggcctcgactgacccatcttgcgctttactctagaccgatgcgagcgagtacccgttacgcctggcggcaggtggcctcatcctcgtcctcctcgccgtctgggcgctcaagaagctcctgaccttcgagttttcgcaggagcctcagacgaaggagccgagccggcttgactagcaacagtccctgtatctgagcttctttcggaagtcccatgaaaaagcatgaaaatccgtctagaggtctaaggtctggctggaaatagggaaggcgagggggagaggagaaagacgagggggccgctttacatcgcatagtagacgaagagcgtgtagctcgtggcgatgatggcgccgaggacagcgatgccgagccaagtgaccgacttgatgggcgagcgcaggccctgcgaccgctcctcgaccgtcgtctcgagctcgtcctgcgcgcggcgccgctcagagaagaagaggacgcggccgaggtacttgcggtcgagccagtcgtaaccgaagccaaaaaagatgtcaatggtcttgagagcaatcatgaaagcaaagaccttgtcgtactctgcaaaggtcgaagaggggaagtgcggcaagcgtcagggccggtcgcagggcgcaggaagctcgtcggtaagacgaacggttcgtcgacttggcgtcggcctgatcctggatcgcaccgacggcgacgtccatgatcgtagagccgcccgagttgaagctcttccaaacgccaaaggcagtccccaggtaggcctgggggacgatgaggggaatgctcgcgctccagggcagagcgttggtggcgagggcgacactgccgaggatcgtcggtgcgagcgggtggacgttgctgtaggcgagcagagcaaatacgaggacccagagcgctgctgtgatggcaatgaagtgcatccgccggccaaaacggtcaaagaagaggccgaggaggggcgtgccaactgaagagcaagcgatagagtagtggtcagcagctacggatgggcagttgcagctgggcaaactcagagaacacgtaccgatggggatgacctggccgagagcagcggtgtagccggcggtgagcctggggtgaggagaagtgcaggagttagaagtctaatacgatggacaggtcgcggggacgggcggcgcgcacttggtcgtcccgcgcgtgatctcaaccacttcggcgaggttgcccgtgtaagcgccgacggtgccggctgaaaagtcgagcgagtgcgagtcagcgacgttgagtctacagcgagcccaccgtgacataagaaagggccaacattggaggatctttgatagcgagagggaagacacgagtcagcccaagacgcaggatgggaggctggaaggcgaacgaaaaaaacctacctgcgacagaggaaggacccagtaggcggccgggagtgcaaagaggccgacgtagttgaagcgcgaggtcgtgcccttggcgacggcgccgagaggcctagccttgcgcccggcgatggcagccgctcgacgaccggtgacgatacggttcttggtcggaaggcggcattcaaaccagacatacaggatgttcaggacgagggtgaagccgcagaagatggccgggacctggatgacggtgatttgacgcgtcagtcgaagtcagagcacacaaccaagtaggcaccgacccaaagtgcccatgcccaattcccgctgccctcagcaatcggaattgcagcagctttcccagcgaggttccactggaagacaacaagagcttgtcagcgttaacggccggtggggggaagagggaagggttgagtgagacgcacgcatcgccccaggccaatgtcgaggccagagatgaggccgaggaagcccgcggtaccagcgacgcccttggcgtagtgtgcgtacgccttggactggaagatctcgatggacgagcttaagggcaggagaggtatgggacacggaaggcgagggtcagcaggtagcgacgagaaagcggccatgaaagccgttactcacgagccgaaaccaaagatctgccgtcgcgcataacgagaggatcagctttgagcgttgccacgtcggctggtctacgccagacttacaatctgtccgccgacgacgaggccgaacgagttgagtgaggcgccgagggcacagagggcggcgccgccaaaaatgaagaccgaggacgtgagggagccgatattcgttccatagtaatcaatgagaacgccggagatgagaggcaagaccgtgttgacgagcgagaccgcgctcgatatgactccatattgagcgttcgatatcgagagctccttcttgaatgtactcttgaggggactcagagaggattgggcgaagttggagccgactggagagggactggacgtcagcccccgcgcagattccggcccggccgcctgcagaacgtctacgtacaggtcaagaccaggacaaaggcgaggacgaggatcttggtgacccaaggcaggccaacaccgccagcctcgagctcgtcctcgagctcggccggggtgtatccgagcgcctgggcgacagccggaagatggccggcgtcggtcgcgcgcttctcatcgtcgaactcggccgagtgcaagctcgcctgcttgagctcgggcgacacgcttcgagaggcgatgggctggctggacatggtaggggatggtggttagcgatcagatacggttggtttttcgtctgacaagcagtcgagggcggagattgatccgaaacccaaccttgccaacgactgtgctccgcctcaggcgctggctcgcccgaggacgtccgtgcggggggcggcaagcagcctttgcccgagactgtgccgaagtcaggcttggcagcggtcattccgccgacggagctagaataccctgtggtacgacggggacctactcaggatgcgcacgcgcgcgtcttcggcccgccctcgctcgatgaatgagcgcgagacgcttcatcggctggacaagggactgacgcaggaggggtcgaactcatcatgtatgaaggtcgacaagcagttggtacaggtacaaagagctcagagcatgtgagctgtgcgacaggcaggtccaggcgcgctagcgcttcgagttcttgaggtcgaccgcctttgtcaggcagtagagcgtctcgaggatcggcaccggcaggccgagacgcttgccctctcggagaggggttccgatgataactgcaggcgagcgcgagagtcagtcgacccgtccgtccctctgtacgaacagaccacgaaagctcaccctcgacctcggtctggtagccgtttgagacgtcggcctgcattgacgagttgagaccctgcgcgtgagactggcctggatgacggacagcggatgagcgcgggaagcgacgtcagtcgtggcccgggtcgctcgagagcgggtcgaggacgtacaacgggccataaggacgtcaatctccgagtcgggcaccttatgaccgagcgcctgagcgaccgacacgacctccttcactgcaaggcggttcacatggcgtcagcaatgagtcatgtgagtgcgaggcaaaaggctcagcccaacgcactgatgttgcggcagaagtcgaccgagtaagacgtcgcattcagcaagtctgccgtgttggtctgaatgagtgctgtcgtcgggttccaggcggcgttcttcaagagctccgagtcgatcagctcgtctcgacaaagtaccgctgcagaagcaagcaactcacccagatgaccttggtccaccgggcggtctgcatgtccttgacaacctcggcctcgatgccgtcgacggtgtggaagagcgccttgagctgctcggcactcgccagctcgccattgtccttctcgccctcttggtagaacgggccaaactgcatgcacggcgacggcaggttgttgttgacgacgagctgcaagaacggacaagcggcacgagatcaatgtctgaacggcatccaatagcggcaagcaggcgcacgtaccccaggtgaaggctgagctgcgccgatccaggtgacggcggtgaggatcgtgttttgcgggaaggcctctttcagcgctgcgaaagggggcagtcgacggacggttagcctgacaacgtttgaccagagaccttgcttgagtttgtgcaacgcacgagcctcagcaccgacgccattctggacgatcatgacggccgtctttccgggcgtgacggccggagcgatgatctcctgcagcgagggcgtcgccgagagctgcgccttcgtgcagcctgagcgtgtcaaaggggcgagcccggcgatgtgtcaatcatctgcgtcctgtagaagctgtgacgagcgcccatctctctactcacagatgacatagtcaaactcggggacggcagtgtgggcctcctccggcgtccggtgtgctgtgatcaggcccaacgtcggtcagtcaggtcggcccgacgacgaagcgtgacgcgcgcgcagcttggagggaggctcggccaatgagcctgccagctacgagcgggacgcaccaccagcaaacttgacgcccttgaccttgccaaacttgaccgagtcgtagtcgagcccgctgtcccggatctgctggaggttgctgcgggcgacgacgtggacgttgaccttgcccttgagcgccggctgcgaaaggatgagggcataggtgcagccgatgccgccggcgccatggatgaggatgttgagaggagcggacatgatgctgttgcgagacggagcgggagatgaggcaggtcgtagacaggaggagagcgcctgtccgtcgcccccgtctttgtcggtcgcacccttgcctggccgaaccggcaaggccggcagcagacggctgtcgaggcttcggccggcgccgggccggaggggaaagtagcgccgcctacgcccgttgccctcttcagccttcctcgttctcccatgaccatcttgccttcctatctctcacccccagttgtccacactccctcctcctccctagcctgctcgtatatcgacaatgcccgccgctcgccagctcacgcccggggtaagctagcttctccccttgctcggcgcgcagtcaccgccgacgtgggctgacccggcgcctctccctccctctcaggcctacgcccctcttatcacgccgttcaaggccaacggggacgtcgacattgaggccgttaaggcgcaggtcgtccgcgtcgccaaggccggcatgggtctcgtacgtgcgcgtccatcgtcgctcctggtgagctcggctgaccgtcaatctcgctgcccatcgccaggtcattcatggcacgaacgccgaggcctgccacctgagccacgaggagcgctcgctcgttgtcaaggaggcgcgcaaggcgctggacgctgctggtctcaaagatgtccccctgctcgtcggcaccggcggccagagcgcgcgcgagtcgattcagctcgcaaaggaggccaaggaggccggcgccgacttttcgtgaggcccgcctttagccgaggtaccgcttcctctcgatgctgacctctcgttccttcgcgtcgttgcccaggatcgtcattcacccgtgctactttgcctttgctatgggccgcgacttgcaggcaatctacgacttcttcatcgaggtcgccgacgcctcgacgctgccggtcatggtctacaacttccccggcgccgcggccggcatcgacctgacgtccgacatcatcatcaaactctcggagcaccagaacatcatcggcgccaagctgacgtgcgccggcattggaaagggccaccgcatcgcccggcacaccaagtcggccgagtacaagaagcggcacccgacgcctttgtgagtcgcctccagcgctcatccggaccccggctgaccctaaagcttccttcagtatcgtcatgcccggctttgccgactactgtgctccggccatgctctcacgccaggacggcatcatcaccggaacgtgagttgccgctcgacggtagtgcatcctgctcggcaggcggtctgacacactgtgtccctgctctccctcacctcaggggcaacgtcatccccaagacgatggccaagctgtacgagctgacaaagaaggcgattgagagcggaacaccggccgactgggacgccgcgctcgaggtccaggacattgtctcggaggccgactgggtgatcgtcaaggctggcatcagcggtacgaagtacgcgctcgacacgttctgctccgagggcggcgtcaagctcggcgggcttgtgcgctcgcctctgccgcagacgtcggacgcaaccaagaagctcatcgacgagggcatgaaggacgcaatcgcttacgagcgctcgctgtgagcgtccccagcatcggatcccacccctgtagcaccagttttgtagatgatcttgaacgggattttttgggattttttgggagacgacttcagtagggcgcgcatcatatctccatcgcgctgtcgtcgtcggcctcgcttgccggcgcgagacccatgcgaacctccatgctcgagcgaacctcggccagcagctctttcgaggcctcgagcgtgatctccagcgcgcagtcgagctgtggagtcgacattggaaggcagaggtcagtactgacaaggaacgcacagcctgaacagaagagcagccaggacgcacgtcgtcctcgtcaaagtcgccgtccgactcgagccagatgacctcgcgtccagcgccgtcaccgtcacccatctcgacgccgagagcggcgccgaatgcccaaccgacgccaaagacggccgtcgccgcccgttcctcgtcgtagtctgggtcgagcacccagtggccgccaggcagcagggcgcagcacgagccaagcgcgagcccggtcatgccgaccgaggaggcgtccatcgctgcgaggctcgctgccgtcaacgcgagcgccttctcggacgtcggcacgaccggccacttgcgattcgatgaggcgctgccggacgacgaggcctctggtgaggggtcgaaccggtcgacaggcttggggaggacgggcagtggcggcgccgagagggcctggatggtgaggaggacgagcgagcgagggtgcgacgtgagctgcagcagaggcaggagcgaggtctcgagcgtcgactcgagcgccttggacgtgataccttggaagagcgggccggtcagctctcgagacgaggcggtcggtcggctcggagcgatgagtacgcaccggcagtgccgtcgagcggccggtggtgcacctcgagtgttgctcggtcgaggcgctcgtcccggatgcggacctccatcgggcccgagaacgaggcgacgagcgaaatgggtcctgtcaaggccaacgtcgaggcttgggtcagctcggcaagccagggtcagaggtgagggcagcggcgccgacgcacccatcgagacccgggcgctgccgtcggcccggtgcagcgtgccaaacttgacgtcaaacggccgggcctcgagcgcgactcgtccgtcggatctagaggtgtcgtccatcgggcaagagaggcgaatggaaggttgggttcgggatggctgtctgtcagtcctctctcggaggggctgctgtgcgcgggcaaatcgcttcctgcacgcgcgcgcgcggcgaaggcacgggagcgagagcagcatggccgtcgcccgagtcagcctgtcgtccaacgcccattccacagcacgagccgactcgaccagaccagagcagcccagagcagcccgaccttgagagccactgttggaccgaagaccgcctgaccgagggcgacaccaccgccgccgccatgcgcaccaagacgcttgagattcgctggcacgacacgcagcccatcttctcgtccgactcgcagccttacccaccccatcagctcaagcgcctgctcagccagcagcagcccgcggctgctccgtctggagccggaaaggaaaaggagaaggaggtgtcggcggcgggcaggagctaccgcgtcgcgaccggaggcgccgacaaccatgtccgggtacgtgcgcgtcgggcgagcccccttctgaccctctcaccctccctcttgcgatccgactgagcactgacaacctggcagacacctgctgctcaccctatcagctctggcttattcaccccaacatcccagacgtcgcgccgtcaacgggcgccgccggtgcgggaccatcgtcggctcaggggccggcgccgagtccgccgccgccgcgcgccgagtttctcgcaaccctccgccggcatacggccgccgttaacgtcgtccgctggagcccaaagggcaggtttcatcgctctctggctcaacatgtctggcgctgacctggttttacgcctcaaccttttgcagaggatgtactcgcgtcggctggagatggtcggtcctcttccgcctgcgcagcgcgttcaccgaccgccgcggctgacaagtctcctctctccctccgttcttcgcagacggctttctcctgctctgggtgcccaagttggctcctgatggtgtcgccgggccgtcctccggcgcattcgccgactcgagcgcgacagaggaggggcagaaggagttctggcgtgtcaagacgttcatccggtgcgcacccgtctctgcgagtctactcagaagctctttcactgaagctgaggtcgtcgcgttgctcactgaatagcgcaaccaccaatgagatctacgatcttgcttggagtccagacggcgcgcaccttatcgtcggctgcacggacaacgtcgcgcgcatctacgacgctgcgaccggcacctgcatcaaggccatcgccgaacacacgcactatgtccagggtgtggcatgggatccgctcaacgagttcatcgcgacccagagcagcgaccggtgcgtaggctctgtctcccagccctatgtcaggtgctccctgctgacgtcccgtggctttcactctgcaacagctccgtccacatccatcgcatccaccaaagcaagggcgagatcgactttatcccgcacggccggtccgaacggcttacgttccacggcggctcccggcacccctccttcggctccacctcgtcggtccggccgagcatggcccggcaagacagctcagccatgtcagacgctggttcggtctttgactcggccgcttccgaccactgcgtcgacgactcagccgcaagtgtgtcgacgggcgtgcctgccggcccgctgacgccctctgcgtcgatgcctggcaccccggcgatgccgtcggctgcctcgatgaagccgccgtcgtcgcgccggtcttcgatgtcgagctccgttgcggcttctccaccgccacccacaagccgcttcgcccgctcgccttcgccactgccggcgatccggccaaatagcctcccgccgacggcgccgacgcggccggccgtctcgaacaagctgtacggcgacgagtcttacacgcactacttccgccgccttaccttttcacccgacggcgcccttctcctcacccccgccggccagatcgagtcgagcctgctcgcaccatcgtttgtcgccgctggcagcgccgacaacgacggcggcggatcgtcatcgaaggatggcaagccgaagcggccagctgcagcgactgatgtcaccaagccgaccgtttacatctactcgcgtgccaacctgtcgaacggcccgatcgcgcacctgcctggccagcggacggcgagcgtcgccgtacggttcaacccgatcctctacgacctgcgtgacggcaaggcagcggctcgcccacccaagacgatcgtcgtcgacgagaagggcgcggatgaggtcaaggtccggatgaacgacgcggtcgaggcggccgtcgtcaaggacgacccaccggcaaacgcggaggcaagcagctcgagcgcgccgcacctgtcgggcgctactccagtcagcgacccccatctcctctcgccttcgccatccccggcgacgccaggcttctcgacaagctcaacctttgccctgcagtaccggatgtattttgccgtcgcgactcaggacgccgtcctcctctacgacacgcagcagacgagcccaatcgccatctttgtcggcctccactatgccggcttcaccgacctgacatggtcgcccgacggccagacgctcctcctctcgtcgatcgatgggtactgtaccgtcgtggtatgtctctttttccattctgacctggcagacggcgctctcgctgactgatctcgtcttgcaggtctttgatccgtccgagctcggcagcctgcaccacactcagcagcaccagaagcagctccaggcgctcgcgcagaacctctcggccgcctcgcacgggtcgacgtcgctcccgccctcgccagccctggcccacgcgacgccgacgcctgtcgcgacgccgacggtcagcgtgacggacgcgacggcgggactggccccggcgggcggccacaagcgaagcatcagcttcgacaagcccgtgacagaggagacgcttgtcatgtcggctcctgcaccatcggcgcccgctgcagctccgacggcggctgcacccgccgcgctgtcagcagcctccgtagcccgcccttcctcatcgacagcgtctgcccccgccccagtggcgccggcagacggcaacgtgaagaagaagcgccgcgtcgagctgaagcacctcggcccgctcgactagcctccctttcgccctcttccgacccgtctccatcttcatctgccactgcgactcgcccccagctatacgacgcccctccgcttcacgattgcacactctcccttccaacgcgtcccacgacagtcagcgagggttgaggtcgggagcagtcaccatgatacatcggcgccttgagccgccgcttcctcgctcacttatcggcgaacgccctgcgacttcttctgcgtctggccgcggcgagctgaaaacggagagaatgggacttgcgtcagcgtcggcaatgtaggttcgagagtaagagggacaagaccgaccgttggcttttatggagagagatgcgaggggcattgcgagtcagcagcggtcgacaaaggtagcccgggacaggcaggcgggtgacgtaccgcgcagaatcgtggcacgtccacgcgctgttccgataccgcggcccttcatggcgttgggtccgacgcgcttgaacctgcaagaaggaggggaacgggggagacgcgtcagcgcgcagggcggcaggtgctgaccgcatcgaagaaggacgaacatgggcgcgttcgcaagcatgtcgggaacgatatagaaccctgtcaagagcgcacacgggatccttcagcctcgagcaccaagagcgtcgggtgtcaaggagagcgacgcacggcacatgctgccccggatgtagacctggtcgagctgcgagacgcggccgtcccggccggtggccgtcacgtcacgcaggcagatgttaagcgagtcctcggctagagcggagaggatcggtcacgggttagggtcagttggggtcctcatgagctgccgatcaagccttgaggaggaaggggaggctccgctgccgtccatcgcggcctgccgagcgcctggttggtgtcgacgcctgcaagacgacccgcagccacccaaacggcccctgctcggcggcagaccctcgcccaacggccctgccggatcctgctcccaagttgcgtccggcaggtcatctgctctaaaccccgtctgaagcttgcgagacccctcgtcggtggccagggtgagagaggcggcacgcaccatccgccagcttgccgcggtacgtctggccagtcttgagctcgacggtgatgacgtgaccgagcgactcctgcagcagcttgacggggactgcgaggtgcacaaagcaggccgagggaaagagggcacgcaggtcgcgagtcgagagacgtaggccggacgaatcgaggcggcgacagcagcagcaaaagagcgggggttcgacctggtcagccctcccgacggcgcctcgagttgccagaaaacgcaggcgagccagtggacgcacctccgaggttggccatgatggatccggactgaaagggcgagactagaagggagaaggggggccaggcgggggtcgtggttcgaaggcgagccagcctggcccgagccgaagctgcctgggtcgagttcgccgccggccgtttgcgcccaccaacccataccccgtcctcctcccgtccccgaccttcccctacccgactctctgctaagccatgggtgtcctttactacggcgcgctcggctcgtcgacgttcaccgtcctggccctctatctcatcctcactggtgcgtgaggctagcggcccgagtgcccggcgctcgcgtatgcccacgtcgatcgtcacgagcgatggcttcgcggcgggctcgagctcctccttcgcctgacggtggaatggccctcgctgacgcttcgatcgctcctcttgtactcacactcggtcataacaggtcaaggagagggtgcgtcgtgctctgtactccagccgagctagaccttgttctggaagctgaccggtgcgcttccaaccgacgcgcctcagccttcaaccccggtcgcttcctcgaggagacgtcgccctacttctgggcgctgatgggcgtcggtctctgcatcggtctctcggtcctcggagctggctggtgcggcctaagcccactccagtatcaccggggagagcgacatggctgacgctgtcactcgcctttcaggggcatcttcatcaccggctcctccatcctcggcggcggcgtccgtgcaccgcgcattcggaccaagaacctgatctcgtgcgttctagggctacaccttggcctgtcgccagtgcgctaacgctacgctcgctgctctgtgcttgcagcatcatcttttgcgaggtcgtggccatctatgtgcgtcctcccaataaccccccccccccgcagcccccccttgatcgaccggagctgacgctcgcaaggccgtcctcacagggtgtcatcatggccatcgtcttctcggccaagattacgggcatgatcaacgctgacgacatctactcgaaaggcaactactacaccggtcaggccctgcgctcctcgctttcccgcatccgcagccacgactgactctcgtcctctgacctttcctcaggtttcgcgctgttctggggcggcctgaccgtcgggctctgcaacctgctgtgcggcgtctcggtcggcatcaccggcgcgaccgcggccctctcggacgcgtccgacccggcgctgtttgtcaagattctcatcgtcgagatctttggcagtgtccttggcctgtacgtttggcctctcgactgaaggacgacggagagctcgactgactcctcttccatgccgcacagcttcggcctgattgtcggcctcctcatggtccgtctggccttcgctccgcacttcagcttcttccgctgccgcgccgactgacccccttctctggctcctccttgacagtccggcaacgcagaagagtttaagtagagcgcgagcatggtgttggtatgcagcgacggcccctggaaggctcactcggggcacatcagatttttatgcgtgcgatggccattactcatagcacgacctgcgccgaggagcctcgcgggcggggcgcccggagcttctgcagcgtccagtcccagagatcgcactgaaaggtcaagacgcaagtagtcagtctcacagaatagcgcgcaggtcagagaggtgtggagcggaagacgtacgccgtaccgccagtagagcccgccaaagatagcgcccgacagatgggccgcgtggttgaacatctgccaggcgcggatgaggccgacgagatcgagcaggcacagagcgccgacggcccaggtgatcgggaagctgatgaagggcaggaagatgatgccgacctgggcgtgcgggaacgagagggcgccgacggccatgatggcgtagagggcgcccgaggcgccaaccgagccgttcagctgggccttccttgcgagccggaagagctcggcccgggggatctggacgccagccgaggcggcggatgagagacgggcgaggaagcgcgggagcgcgaccaggtttgagtggaggtgcgagccgagcgaggcgaagatggcagcggcgaggtagaatgccgtcaggtgccagacggcggtcgactcttgcatgccgggaaacgaggagagcgccgcccgatcgccgtggacgaggaaagagtaggccattggtgctgtgcggggcacgtcgggtcagcaggagcgaacgactcttcttcgaggccgtgatgggacgcactgaaggaccagagcgcaaacatgttgaagccaaagtgccagaactcggcgtgactgaaggcgctcgtcagcagcgtgtagctcttgccagagatcggcgagtgggtccacattgcggccatcgtccgctgaagcctcggaattcgccagccgataaagatgagcgcgttgacgtagatggccgcggaggcaaagcgcttggcctcgctcgtgttgagccaattctcggcaatagcaacatagccgtgcagcagcgtgttggcgaagccagcaggaaagctcgagagggccttctgcaggctgccaaccgtgtcttggaggtcctggagatggacgcgccgcacgaggagagcaacatcagcgcccagcctgcgcgcgctcgcgattgcaggcggcgcaccttcatcagcgcaagccgcttcgcgtccatcatttccttctgtgtcggctgagtcctccgccagaacgagccggcgccgagtttctcagcccactcggccgtgtcctcgttcgtgatcatcgccgctgcaacgtagaccgtcccggccgtcaaaatggcccactagaatcaagggggggagggggtcagcgacgcctgcgaccaacccgtactgccgacacgacgcgcgtcgtcgcgagactcacgagcactggccgcagcacattagggcgagcgcctcggagctcctcctcattgaaagtcactgccaagctagccgacaccggctcctctgctgcagttgctgtcgtccccgtcccggccctggcttcgctcgccggcaccctgacgggtatgatgcgcccgatcggtgttcgattcgcgccctccgagccgtacgcctcggcaggcggctgctcgaagcgcccgcgaggaacgggaggcggaaggccgctcattaaccttgagcgcagaggagggcgggacgaccgagcgcgctgctcggcgctggccgaggtcgagaaggccctcctggcgagcgcaagtggaggtggtgacgaggcggaggcgacgagctcccggaggagcgacgagcggacgaacgccgtcctctggatcgctgccgggagagatgacctcgtgaacatcttgagcaaatgcgaggctattagcagcgcgtgctgtccaggtgctctgctaggacagttggcgaggctattcgaacggatgggtggtggtcggaggcagggacgagcttcgacttgcgccggccaagacgggcagagggccagcgctgcatcgacctgcctctgtcacccatcttcgcccgacatgtcctctcaagacatctgcccgcacgtcttctcgaccgatgttcaggcgccgcgactgtgggtctcgctcttggtccgctctggccagggttctggtagcaaccgagctccgcatgctgaccctcgtcacctcacgccgcacacaggagccacgccgtccatcgcgaggaatgcactctctgcttcgacggtcaggtacgacccggagctccttttggatcgattcaggtcaccgactgaagcgtgtgctggccgcgatgcaaacaggactcgcccgaaggtgtcgacgtctgcctgacctgctacaacggcggctgcacctccgaggagcgacatcacgcccgctcgcactgggagaagagcggccacccgatggtcgtcaacatccggcggacgcgcaagcctgggaaggagcgggtgagcctgctgtgtgaccgttgacttgagctcaaaggcctcggcgctgacacgagtcccgggggctcggaccttctttcgacgtaggacgacgaggaaccgccgctcaagaagctcgcgatccaggaggtcaaggaggaggacgagtacgactttcactttctcgcacgctgctacgcttgtggcggcatccccgtcgacccgacgccagacgtgcgtccactcaatcgctgcagatgaccctcgatgcctggcgctgacgccgctcgccgagctttgcagatccaacgggtcatcgacggcatcatgagcgcaaattcgtcggcccgtcagtcggagatcaaggcatgggaggaggagattactgcgtgcgagcacacgcttcgcctcgagcaggtgccgcccaaggaggtcaagtcggccggtgcgtcgtgctgcgcttcaacttcggcgccgccacgtcacctcgccgccgtgactgaccgacatgcgccacatcctcttcaccggctcaacaggagcgatttgctcccaatgcgagctcggcgggaacctctggctctgcctgacttgcggctcgctcggctgcggccggccgcagttcggcggtggcggcggcaacggtcacggtctcgcccactttgaccagacggcgcaccctgtcgcgctcaagctcggaacgatcacgcccgagggcacagccgacatctactgctactcgtgcaacgacgcccggctcgaccccaagctgaaggcccactgcgcgacgtttggcatccacctcacttcccagacaaagacggaaaagagcatgacggagctgcagctcgagcagaacatcaagtttgactttagcatgacgggtgacgacggcaaggagctccagccgctctatggcccaggactgaccggcctgaaaaacctcggcaacaggtgcggctccaaagctgccggtgtccggtaggcgatcctgcgctgacaatctctgatccacctcgaaccgcagttgctacctcgcttcgaccgtccagtcgcttttctctctccccgtcttccagaagacctactactcggccgaccggtcgcacacggcaacgtgctccttgccgcccgactcgtgcttcacatgccagctgcgcaaggtcgccgacggtctgctgtcgggccgctactcgcatccgagcaaggcatccaagaatgcctggcaggaaggcctcaagccaaacatgctcaaggagctcgtcggcaagggccacgaggaatttgcgagcatgcgccagcagggtgaattaagcctaacgaccgctacggtcgcctgagcgcaactgatgccgtgtgcggtgctctcgcgcctactttcagatgccgaagagttttttcagcacttcctcaagacgctccggaccgacgcgcagaagcagcgttcggtcgtacccggctctggctcggagccgaccgatattttccgctttggactcgagcagcgtctccagtgcacatcttgccttggcgtccgctaccggaccgacgagcaggacagtgtaagcgtcccgatcgccgccgtcgagaagggcaaggacggtgacggcaaggtgctctacgagagcgtccgactcgaggattgcatcgagcaggcactcgagccgactgagctcgagtacaattgcccgagctgcaagaagacggtcacggcgatcaagtacgtccttgtgcctctgccttcctttgcagaggcgattctgaccggagtctcctcgctggcgggtcatccaggcagacgcgcttcaccaccttccccgacgttctcgctcttcacgccaagaagttccaactcgtcaactgggtgccgcagaagctcggtgggtctaagagtactcaggtggctctgatggcaggcggctgacctctattgccttcctcgtgagcagaggttccgctcgagtttggtaccgaggtcgacctcagccagtggaagggcactggcctgaacgagggcgagactccgctgccagaggacgaggccggtgagctcatcgccttctgctttctttatcctccctccatctcggattctgacgcatctcgtctccgtgatgtcgcagccgcggcctccagcctgcccgccttcaaccaggccgctctcggcatgctcgaagggatgggctttccgctgatccgctgtcagaaggcgctgctcgcgaccggcaacgcagacggcgaggcggcgatggagtggctgtttgcgcacatggaggatccaggtgcgtctgccgccctcatctgctgggccaagcagctgaccttgatcttgtctggcagacatcgacgcgcctctcgagactgacgccccttcgagcactgcctcgaccggtccttccgccgagcagatctccatgctggtcgacatgggcttctcgcctgcccaggcgcgcaaggccttgcgggtcacggttagtcctcattgtcctcgccgcgacgcgttgattggtcctgagaaggaaacctcgcactttctctagtctggaagccccgacgctgcggtcgagtggctcttctccaactcggatgacccgggagaggacgaagcgcccgccgccgatgttggcgctcctcctgtatcgtcctcctcgcccaatttcggcggctcggcctcactgccggccaattaccggctcaaggccttcatcaaccacaagggaccatccgtccactctgggtacgttcctgtcttgccctcggcgtcatgggaagatcgttgacaccgtcgatgctcgctttctaccagccactacgtcgcgacgattgaacaggacggcagcgcagtcctcttcaatgacgagaaggtcgccaagagcgagggctcggcgcacgacaacctgaagcaggcggcgtacctgtacatctttgagcgggtggctgcctgaagcgcgagagggggatgacggcgacgacgacacgacgagatgagcgcgcgaagtgcagcatgacatgaatttgacaagctgtgccactgcgcttcagatcttaagcagcgctgaggccagtcgacgagctactggagcctttgcagcctgacctgtatctacgaccgcatttcaagaggcgcccgctgcctcgtcaccttccggccaaccccgtctcgcgctgcacaaagaagaagcatgcgagcagagagatgacaaggggcggcgtgtctacggggcgcagtaagagaagaaggaagggtatagcggggcacctgctcgttactcgtttgtaagcttgaagacgatgttcgtgatgaccgagactgcggggtagagcgcggtttgaaaggaggtcagtggcggtgcgacagggcgaaggccgacagtaacgcgccgacagggtggcgcaggacaggaacgagaggccgtctgccgtacatcactccgctctcttttggcaactggctaccgacaggcaagcggacgtactgatgagaacggcgcaaaggacggtcggaccgacccggtcgtcgtacgcctgggccttgcggcggatggccgaagcgcgctggtggtaacggaagagagcgtatgccatcatcgcacaggcgatgagcgtgtagatggcgccaaagatcttggagagctgcgatgtaaacagtgccagagcatcgcggtcagtcgtgctccttcgtcagagggaggaggagcgctgcgctgtgctggtgctgcgggcgacatccgaggcttcctccaacatccctgcggaacgtcgctcccccgcctctagcaggcgcacagacgatgatggcgggaacacaccttgtcaccgaagttgaggaggccgactgcgagaccgccgagtacaacggcaaagtgcatcctgtgagggtgctcctacgtcagctagggtgctgacgtgggtcctgcgagccccccgctctaggtgaagctgcaggacatctgactcagcacagggacgcaccagctcaggtaggctgtaaggcaggcataggcaaggacaacagcaagcagcatcagtcgtgcgagcggcgggtcggcccgcaatcaggccggcgcaagcccgtctctcgagcgccgtctcagagacaccacgctagacgcaaaggggactgactccgctcgttagcaaagaagacctgggaggtgcgagggaggaagcagccgcgtgtcagcttcaagctgcagaagaaggaacaggcgaccgggagcgtgggagcccttgagcgggagggagggaaggcctcgctcatggtgcggacgaaccttgggctcctggcggacggggagcgcaatccgcttggcggccgtgcgctggaggagaggctgggtcgacatgctgaaacgggagatacaaacgagaaggggaagacggtgctggtttgggcgtttggagagagagagagagggctcgtcgacggccgcggtcgtttggacgagaggtgggttcgaacgcacggtggtcgaagacgacggggtccccgcacagcctccctcaacctgtccaatccgatggatcagcgggctcgcaggtatatatgagaagcgtgcagatggacgaacaagttgctctcggaacgggcgctctatcgtaggtgagttgtaagagatgcaagaatcgggcgggcttggctacgtagtctctgccaaccgtcccccgtccctcctcgctccgcttccaacacgtcgtttcagtgttgacacgaggctcgtcgagtcatcgtgcagcacttgctcgacctccatccgtcgactgcagcgaaacctttggcttctctgttcagtccccaactctccaccagcctctccgccgcctttaccaccgtgagacggcttgagttctgtgccggccttctcgtcgagggcaccggctcgctccgtcccctcgggcactccgccctcccttacttgcgcaaacggccaggtaatattttcggggtcatagaatcgtggacgcggcaggacgtgtggcttagtcctgaagaaggcaagggaatgaaaggcgaagttagcagctgaaagcgagaacattagcgagatgataggatgtgcctgcttcgtcgttccacggatgagaccagtacgacgggccgcgataagacctagcgtagtagaaggaggaggacggtcagaggtaagtagaagaagagcgagaagggggaggtcgacgtaccagccttctgtccagagacggcaccacgggcgatggtcgatgccttgccgatgtcttaatttccaattcgtcgcgagtagaggaggttagaaaaggaggtagagggaggaagggaggagggacagaagtcgatgtcagtgcgcagtcagcccacgaccactcgacgcgagacgcacgctggtggtttcctcctccgtgggggtggtcgaccgggttcatggcaacaccacgagtacggggccacgagttgcgcttcgccttgaacttgaagtaggcgcggccggccttgaggagcggcttgtcgacacgacctccgccggcgacgacaccaatggtggcgcgggccgagccagagatggtcttcttggcacccgaggggagacgcaggcgcgtcttgttctcgtcgggcgagtggccaatgacggtggcgtagttgcccgaggtccgggccatggcgccacggtcaccgacgcgctcctcgacgttgcagacgacggttccctcagggcactggccgacggggaggacgttgccgatgttgagcgaggccttcttgccggcgtagacaaacgagcccgtggtgaggccctcggtggcgatgaaggtctccttgtggagcttgtaccggtaagggtcccggaagacgacctgggcaaggggcgcaccactgcggcaggacaaagagcacgtcagcccgtcgagctctcgtcgacgatgaggagccgagggaagcggaggactgaccggccagagtcgtggatgatgtccttgacgatgccgcggatgtagccgttcttctcggcgaagtcgagcgcacggaggcgcgccggggccttgttcaagtgcgtgtgcgacttgaagatgccgccagacttacgctggttcttgataacacgtcccatggctgggagggccggagagcacgagccgaatgcagggcgggtcagcgagctggtatgaggcagcgcgcgtgcacaggtcgaccagcaggtccgcctgtcggcaggcagcagcagctccgcccaacgcccctccttcccgtcgcacacccggcgcaaggagcaccgaagccccagccccgcccagagcgagcgatgcatgcgagttaggcccatcctgcctccgtcacccgcgcgccctgctgcccgtccgaacgccgctcctgctgctgctgttgcgtgctgctgcaccgatcgtgctgttgctgctgctgctgctggcttgcgcggatctgctgaagaggaacggagggaatgcttacctgcagaaatagaagcggaggtagggtcaagggtgtcagtgccgagctcgtccaagtgagcaggtgcctgacgggcgggcgagcagtcaacagcatcggcacaggccagccgaccgaccgacgcctggcatgcaacggatcggcgtgaccgctgctatgcgatgctgcgtgtcgtgcctgcccgagctaccgttcaggaacgaggaatgtacggacctgatgatccttgacgaggtgtacgaagggcaaggcgagcagacagaatgctgagctcgagctgagttcctccgcccgagtcggcgcgcgcaggcccgctgcgggcgccctcactgggaggcaatgacccaaacttggggtttgaatcgcgcgtcgtctgggcttgtgcatttcgttagccggccctgaaatgacgactcgagccaagaggaaattcagaccaggcctctggcttgcgaggcggggcaggacccgctcatgatgatttctcgatcaaaattcccattatgtccaaaagttcgcggcgtcgaggcattctcaggggctgtctcgtcgcgcacgctggcgagcccttgcgcaaacctgacgcttcaagcgtcccctgctctgccagcgacgacgataagatggtgcgagtcacccagccatcgacgacatcggctgtcgtcctcgtaaagagcccaatggtgttggccatacgggacagagagcactcgaaacaggcgcccctgcctttcttactgccagtcacaggatgacgtctcgagatcctgcgctgccgtcaaagcagcctcgctatcgacctggtcgaaaccaccgaatctgcgagcgtttgctcagcgtcggttctgcgcaagagtgccggtgccgaaaggctagtgatcaggcgtcaaagagatgccaggcgtggcctgcaggaaacgatccgggcagtgctcgactgtcaggaaggagggacattgcctgttcgtctgtttgcttaccgagcctttcgctctttcgagtcgtcagcgcaccgaatctcccacaaggagtctctctcattccaaatctacgttgagcagcgcatcacattcccctcgcgagccactcgagcgtctcgcgctcgacaccgctcgcctgcccgccgccgacatagtcgccctccggctggccagggacgaccggcccaaagcgcttcccgacgagcccctcggcaatgaaggagaaggcggcacgcgtgagcgggtcggaggccgtgttcggcgcgagggccgcctgcgtgatgaggccgtgtttcgaagtgatgctgccctgctaaagacaccaagcgagggggaagccggtcagcgagcgtcatctcttgcgggaggaggaagacgtaccagcttcacgcccgacgagagcgctggcgactcgagctcgattgtgaattcaggcgtctggccgtactgccatgcccaggcctgagacagcgaatgcaagtcagcgacgagacgtcgtactccgatcggaggagcaggcgagcgcaccttcaggtcctctgcctctcggagcacctcctgtgctcgtcgcccgcccgccgcaccaacggacgccggattgacgtcgacgaccccaaggccggcgtcaccgtaggtcgcgtcaaattcgacaaggacggcgtcgacaaagccgccgtgcgagacggtcgggtggagcgaggcgatgttgctgacaggggacgagaccgagtcggtgcctttgctggccgagaaggtctataagggcgctctgacgatcagcgcaagcaaaggaggcgaaagagagcttgctagggacgcactcttcctgaacggagcgcagcgccgagctggtcgagtcgtgcgtcgataagcatggtcccgtggtgatacgctcgccggttgttgagccggtaagccgagcctgagatgtagaaggacggaagtcaggtcaaagacgccaactgagcagcgacgaaccccgatacgacggctgatactcatctttgacccctcgagcgtgatgtcgctccgatggttgacctcggccgggacgccgagtgagcgcagtgcgcgcgtaatgagctcggcgttcgggcgcctgtcaaagatgtccttgggtaccatgatcgagtagttggtgttgccgaggtcctgcgaaaggtaagcgtgtgcaagtaagttgtttgcttcaaaagcaggaagagtgcgcagggggaggtcgcacatggtagacagtcccaccgccgctgcgccgccgaatgaaagggatgccgcgctgctgcaggagcgggatgttaatctctttccaggggttctgcaagcggcaggtacaatcgcagacgccttgtcagttaagcggaacgggcggaggcggagaaggcccgcctgcgaagggggctgcgcacctgattccggccgagcacgacagattccgagttgcggtagaggaacagcatcggcaaggcggccggcgtgttcttgtatagccttcgagcgggccgatgagcgagagagcgcagaaagtcagcaggtataggctgccggcgatgcgcagcgcgatgaagggctctagacgcaccagtcttcgaaggcgaggttgaaccaggggtcggtcgacgacgagacgtacatccgagggtgatcctgcaagcaagacggaagaagagggcatcagttctggctgaggcgatgagtacggagcattaaccgggccttacctcgtcggacccggccggcaggctggtcgagctcgttgagcgtcgtgaggacgacgacatgggatggagcgcggcgacctggcagaaaggggcaccgagccgggccgtgctcgcgccgagccaggatctgaggagcgagcggttgagcgacatgctgccaggttggtcgaagggttgaggccggagatggtggtcgcagggcgggcaggtcgcctcgtcgaaggggagcagcagcgagcgattgagcgagcggggggcttgtgggctgagtgcggcggcggcacgtggtcggcccgaaggtcgatcgccctgccgagactggctgcaccgtctcgacccgtcttgccttcgtcttgccttcgagtcgctcaattcgcagacgaccacccgcatctccctcacttccttctctctttttctcctctctccgcctgtcctctactccctgctgctggccaacagggatcgctcggcaaaccctcggctctccctccttttctcagccgccgcgcgcgtcactgaacgagactagacctacacccctccgcctgtcttaatatcagcgcatctaccctccccccctccgaaagctcgtcggcagagctgcctgtgccaagcatgtcgccctcgctttcgtccaagctcgcggccggcgccgtcctcgccgcactcgctgtccggactgtcacggccgagccgcagaagctcgccaagcgctacgtcggcgtcgattttgagacggacttcagtgagtcggctcgccctcgtttcggctgctgagcccctctctcccgccgccggccgaccaaggctgatgctgctgctttctcgatctgcagacttctatgacgatgccgacccgactaatggtgcgtctggcgtcaagttcgatcgctgcctgcgcactgatgctgacgagccatccacccctcccttgctaggcttcgtcaactatgtctccaagtcgactgccaagcagctcggcctcatccagtcgagcaacaactacttcaagatgaaggtcgacgactttaccccgatcgcctcgggccgcggccggagcgcggtccgaatcgtcagcaaggacgagtacgccgacggcgtctatgtcctcgacgtcgaccacatgccggtcggctgcggtacgtggccagcctggtggacgacgacgctcaacggctggcccaaaggtggcgaaatcgatatcatcgaaggctccaacgcctggccgggcgaggagacggacgcctggaaggcaaccttcccgtcgtcgggcccgaaccggacggcggccttcctccagaccgaccaggacacggcctcgctccacacgatcccgtcgtgcaatgtcgagcaggagggcaggcagacgggcgtccaggccagccgcggttgcgacgccaacatcaacaacaaccagggctgcggtgtcgagctcggcaacgcgacctggggctcgtcctggaacgccaacaatggtggctactacgtcctgcaccgcgacttttccaagtgcgccgcctcctcttggccctgagacctgctcgcccccgcagacgctgaccatggccgcaacctcttgaggtcccgcacgatcgccgtctacaccttcccgcgcacggcgtccaacacgccgcaggagctgtcggactcggcctcgacggcggttgacccctcaacctggggcatcaccccgcaggccaacttcacgattccccagtgccgcgaggacacgttcaacagccacgtcatcgtcttcaacattgccctctgcggtgacctcgccgccaatacgtttgtcggcaacggctgcccgggcacctgcaacgactttgtcgccaataacccggccgcgatgcgcgacgcctggtggggcatccgcaacatgcgcgtctacactgccagtggctcgcccgtcgaagagtgcgtctttgcgacccctcctctcttcccctccgacttgcgcccgctgacatcgccagctctaactctcctcgcaggggcatgcggccctgggttgcggcgctcatctcagttgcctcgatcggcgtcgcgctcctcggcacgatggtcctgctctactacgtctaccggaagcggcgcgggtaagtcgagccttcaaagtcgagctcaagcgagctggtcggctgacgtcctgcgctcattcacagacacaaccacagccagcacgtcgaacttgttgactctgacggacttaagggtgccgagtacagtgacgaccctgccgtcgccctttccgacaaccggcggccttcgaactacggccccttcgtcaacgtcgacgtacatgacatcgggcccgactcgacggcgccaacgaaccgcaactcgcaggtcgtcggctcacgccggcccaagccgagcggtagcgactcgaaccgcaactcgaccgtcggcaaccgcaagtcgggcgtcgatagcaaccgggtctcgatgttttcgttccaggcgccgccgaaccggacgtcggcctactcggccgtcggcgcggcgaacgccaacgctaaccgcaactcgcgcgtctacgtcgacccgcgggcgaacctcggcccgctcaaggtcggcgacggcggaattgtcccgcgcgcgccgtccgaagtcctgcccggagagacgccagctgtcagcagcatgaaacagtacaacacgctcggcgccagctcccccggtggcagcggcggcggcggcggccggctctcaaaggcccgcggcccgtcgccctcgacctcgcagaggaccagccggcgtggcaacgtcggccgggcgaacgagccgccttcagctgcagcgcccagcccgcgccaatcccagcggggggcgccgcgcgtcgggcaggccatcggcggcacgggcgcgtcgaaccggtcgtcgtacgtctcggacgggtctggcatcatcccgcctgagtcggccgcgatggaccgcaagtcgtcgtgggacagccaggtcggccagaagctcgcccgacagcagggacgccggccgagtgccgacgccgagacggccgacgctcagggtggcggctggggcactgacgacgagcagtaaacgtctccccttgtccagcatctcagtctttctccatctaatcttcccctaacatcctatcgctatctccactatccttccatcttgtcccatgtcatgtcgactccccccttcttcgagcgcgagtcagtcagtccacgagtgaatgagttcgcgcgcggaagttagatgaaaaccagccggaccaaatactctcgggcgcacgcgcgcccggggaggtcgccgacgcgacgcgtgggagtaggtcggtcgcttcgagaagcggcttggactcgagtcccccgaaccccagaccaggctctcctactcgcctgacccgcccaagcaacccgccctgccatgaccaagggcaaggagcccgccggctccgtcgagggcaatatgatcttcaaggtgcggctgcaatcgccggtcgagctcaggacgcggcgcccgcgcgtgcttgcacgctcctacgccgtcgctcgcccgagcgagcgccatcatcgcacctcgcccgagctgccgagagccgacctgatgctgacgatgcctcattatctctctaggcgacctactctggcgttccgtaagttcatccgccggattcgcatgagctgtcgggcgaggcgtctcgctgcttccgggctgaccccctcgtcgtcttcgctgtctcacggcccctgacctcgcccggcgacctcagcgtttacgagatgtgcgtccgagctcgtcaagcagtctgaagcgagcaatccagaaggtgctgacatcttccgccatgcgccgacatctcgtcaggatctgcaagaatgtcgcagtgatgcggcggcggtccgacggctggctgaacgcgacgcagatcctcaaggtcgccggctttgacaagcctcagcggacgcgcgtgctcgagcgcgaggtccagaagggcgagcacgagaaggtgcagggtgggtacgggaaataccaaggtccgtctcgaatgcgcgaggtgctctggtgggagcgctcactgacctctgtcgtccttcttgcgcgcaggcacctggatcccgattgagcgcggcctcatgctgtcgaagcagtacagcgtcgaggacctcatgaggcccatcatcgactacatcccgacggccgaatcaccgccccaggcaccaaagcacattacggccgcaccgacagcccgcgtgcccaagaagcccaaggtgtccggcccctcgacgtcgacgccgaccaagcctggctcgggcggccagggctcgatttcggtcgcgacgacgccgctgatgtcgcgaccggtcatcaagccgctgccgacagcggcggcgctcgccaagtcggaggcagcggtggtcgagcgcaaggctcgaaaggaccgcgaccgcgaggaaaagcgcgtgctcgccgtcaatgccgcacgggcggccgccgacgtcgagaccgacatcgacatgaactacgatctcggcggcgagtcgccgtcgagcgccgaggacgactcggctggcggaagcccgagtaggcggagctcgagttcgcggtcagcgagcccgatccagggcagcgacgaccccatcgagggcagggaggacggtctggccggagcagtcggtggtgggagtgctagcgggaacggaggcggcgctgagagcgaggccaacgggcgaaagcgcaagttcgccgccgacgggtacgagcctctcgccaagcggccgacgccgttcagcggcgaggatggccttgggcacccgatccagtacggtccgccccagccgcagtacagccatccaatgcacagcttcccggccggtaaccagccgcaagactttctcgggcccgagcgctacgaagacacgatcctcgactacttcatcactgaaacgtcgcagattccagagatcctcgtcaatccgccggccgactatgaccccaactcgtcgatcgacgacgacggccacacggccctccattgggcatgcgcgatgggtcggatccgggttgtcaagctcttgctcgcggcaggcgccgacatcttccgcgtcaaccactcggagcagacgccgctgatgcggagcgtcatgtttagcaacaattatgacgtccgcaagtttcccgagctctacgagctcctccaccggtcgacgctcaacatcgacaagaacaaccggaccgtctttcaccacattgccgacgtcgcgctctccaagggcaagacgcacgccgcgcgctactacatggagacgatcctcggccgcctcgccgagtacccaaaagagctcggcgacgtcgtcaactttcaggacgacgagggcgagacagccatcacgctcgcagcccgggcccgctcgaaacggctcgtcaaggccctgctcgatcacggcgctgacccgaagctcgccaaccgcgacggcaagacggccgaggattacatcctcgaggacgagcgcttccgatcgtcgcctatcgtaggcggcggcggccagggcccgtctgaccgcgctggcccgggctcctccaacggtcacctgacgaatcccaactatatcaaccaccagccgccgggcctgtcacatacgggccagggcggtgccagctcgagccgaaccgacccgctcgcgcccccgccggtccgcaagctctaccactcgcactcggcccagctcgctgccggcaagacgagcgccgagattgccaacctgctcgcgacgctcgcccgttcgtacgacgacgagctccagacgcgcgagcgcgagatcggccacgccaacggcctccttacgacgatgcagaccgagctaagcgagacgcgccgccagaccgaggttttgcgggccaagctcggcagtcagctccaggatgagcaggtgcggctcgccgagctcgaaaaggtgctcgagctcaagatggagcgcgactatgccctcggctggagcgagtggcacgcggccgaggctgcacgagaggcggcttacgcggccgacccagccttggtctcggccgaggaccagggggatctcgcccagcggcttgccctgccgaccagcgaagccgagcttgaaacggagcaggccgccctcgcccgcgacgtcgaaaagctcagcgctcggcggcgcgagctctttggccgctttgtcgcgctttcgtcagggcttggcactggcgagcagatgggcaagtaccggcgcatcattcaggcctcggccggcggccagacgggcgacatggacgaggtcatggtcagcctgctcgaggtacgtctgcttcacgcagaatggacttcgatcgggacctctgctgactgacgatctgccggatgacagacgctcgagtcggaaggagcctcttcagtacccctgccgggccggacaccgccgcctcgggccacgacgagtgccggcgtggccccctcgacgccagcgccgagtctggctgcggctctgccggtcacgtcccgggcgacctgatgcgctcgaccttcggcatctcgcgtcctagtcgcttcgcacgcgcctgctcttgtaccgctttcgtctgtctccaacctccatgtaccggtcggcgtcgccaccactcgtgtgcgcgtctagccgctcgctcgccctttcccctgcaacacgctccttctccctctccctttcatgtaacgcccattcatgacctcttgtccagcttggcgagggtggggcagggacagtcctttagaagtgtctccgtctccgtctcaggatgatgtacaaatcagtggcctcgagtgcgcccggttctgcgacgctcgggcgaggcttgcaatcgacagacggctgcgcggacaggggtcaacattgtcctttcctgtggacatagtgctgaagctgcctctgaatctgttgtaccatctccatgaagtctcgatctttggtggccgacccgccccgctctgttcttcgacctcagccagacttcgatgtgcgcgacagccgaggcgagactcatgagcccaagtaagaacccccggccgggctttgcttgaaatcgccgagcgcggcgcgggcgagatggggacgagactcgctgcttgtctgctccttctcgacctcccaacccctttccgccctcgctgcaaccctctcttcttgcccagcatggtccgtgtcggcagcacgcgccaattggtctcctcgagactgtcccgctgactcttcagtccctcccgacagccgatgatgttggacatcaacgtgagtcgcgcctcctcctccgtcgagcgagctcgacgacaggctgccgcctcgctcaagccctttgaggacctgagctgcaagagcgaccctcactgacgtgctgctgccatgctctcctcgcttgcatcgctccagcgcgtgctctttgcgcgctctgaccgcgtcaagtcggtcgacttccacccgaccgagcctcatgtcatcgcgtgcgtagccctgtttcggcctctccggctcccggctcgagcggcagctccctcagcctccagcttggggagggagctacgcgttctcgttgcaacgcgtgtcacgctttgagcggcctgctcgctcgcgacgccactgcctttgttctggccggttgctgacctgcctgctccccgcgccccgccatctgcccggctgcgtccctcgcctctacagcggtctctacaatggctccgtcaacatctggaactatgcgactggggtgctcgtacggacgtttgaggtcaccgacgtccccgtccgctgcgtcaagtacatcgcccggaagaactggtttgtggccggtacgtctctccttggtcaggcacgagcagcgagctcgggcgctcggcatgagctgggccggcagcttcgagcatctgctgatgaccttcgtctacctcctgctctcccgcgtctgccctgcactcgtcactcccacccgcgtctgtgctgccggctgcgtcgtgcgcccgactcattgcgatttcgaaccttctgtcgctggacgtgctcgcccgacccaggctcggacgactttcagctccgcatctacaactacaacacgcacgagaagattgcggcttttgaggcccacccggactacattcggtgcctgaccgtccacccgacgctgtcgctcgtcctgaccggcagtgacgacatgacgatcaagtgctgggactgggagaaggggtggaagtgtgtccaggtccgtcgctctcgctgcttgctcgcggtccctccgcaactacctctggtcggccgactgatgccgagcggcgtcacctcgacagatgtttgagggccacaccttctacatcatggcgctcgccttcaacccaaaggactcgaacacgtttgcctcggcctgtctcgaccacacggtcaaggtctggtcgctcggctcgccgcagcctaatttttcgatcgaggcgcacgacaagggcgtcaactttgtcgaatactaccacggcggcgacaagccctatttgatcacctgcggcgacgaccggtgagacctcgggccttgcttctgtcactcttgacgaggttgctcacccgctgattgccctgcgtccctgctcctgctcccagcctcattaagatttgggactaccattccaagtcgtgcgtccaggcgctcgagtcgcacacggccaacgtctcgtttgccatcttccaccccacgctgccgctcatcgtctcgggctccgaggacggcaccgtcaagctctggaacgcggcgacgtaccggctcgagaacacgctctcgtacgggctcgagcggacgtggtgcgttggctaccggcggaacggcaacgaggtcgcctttggctacgacgagggtgccgttgtcatcaagctcggccgcgaggagccgagcgtctcgatggacacgagcggcaagattgtctatgcgaagaacacggaaatcctcacgggcacggttcagcaggcgaccggcggtgccgacgacgacgagcccgttgaggacggccagaagctccaggtctcgatgaaggagctaggcgcgaccgaaatttacccaacgagcctgcagcactcgcccaacggccgctttgttaccgtctgcggcgatggcgagtacattgtctacacctcgctcgcctggcgcaacaaggcctttggcactggcacctcgtttgcctgggcgggggacagcagcacgtacgccgtgctcgagggcaagtcgcgcgtccgcatctaccgcaacttccgcgagcggacgggcctcatcaagagcggctctggctgggcggtcgagggcctccacggcggcgtcctgctcggcgcacgcggcaacggctttgtcctcttctgggactgggagactggagcggtcgtccggcggatcgaggtcgatgcgcagagcgtacgttcttcgagctctgcccgctcctggtaggataacgctgactgcagctgcctgctgcctgctgcagatctcgtggtcggccgatggcacgctcgtcgtcatcaccggcgaggactcgttctacctgcttcgctttgaccgggcggcctacgacgctgcgcttgagtcgggcgtcgagatcaccgacgagggtgtcgaggaggcctttgacctcgttgccgagatttctgacgtgtgcgtcctcgcgggcggactcttgctgtcgttcgcttagctgacgacgtgtgaccctctcgatctgcagcgtcaagacgagcaaatgggtcggcgactgcttcatctacacgacggccagcaacaagctcagctatctgatcggcgaccagtcgcacgtcatcaaccactttgaccagccgatgtacctcctcggctacattccggcccagagccggctctaccttgccgacaaggacgtcaacgtctactcgtatacgctctcggtcgccgtcatcgactaccagacggctgtccttcggggcgacatggacggcgcggcggctatcctgccgacgatcccgaccgaccagcgctcgcgcgtcgcccgcttcctcgaggcccaggacctccaggagctcgccatctcggtcacgaccgacgccgaccacaagtttgacctcgcgatcgcgctcgacgacctcgacgtcgcgctcgacctcgcccggtcggcgcctcaggtcgggagcgagccaaagtggaagacggtcggcgacaaggcgctcgctgcctggaagattgacctcgccgaggagtgcttcaagaatgccggcgacctgcccgcccttctcctcatctactcgagcgtcggcagccgggacggcatggcgtggctcgcaaagacggctcgtgagttggatgctcagtccgatgcacacacccgatcagctctgctgactgacgaatccacctattctttcatccgccccagtcgccaagagcctccacaacattgccttcacggccttcctccagctcggcgacgttgcgtcctgtgtcgacctgctcgtcgcgaccgatcgaatccccgaggcggccatgtttgcgcggacgtacgcgcccagcctggtgccggccgtcgtcgagaagtggcaggccgagctcgtgagcgagggcaagaagaaggtcgctaaggccatcatcaacccggctgaggaccctggcgcgtttgacgaggattgggccgagctgctcgagctcgagaagaacggcgcgtcgtcgtcgtcgcaggtccctcgggaggctgcgcaggacgaggacgagcaggaggacgagaggcctgtcgtcgtcgagagcgacgaggttgacgagtcggaggagcccgagcgggcggcatcgcccgccaaggtcaagtcggccgtcgaggacaaggtgccggtgctcgcgcccgtcgttgacaaggtcgagcagctcgtcgacggcgtcaaggagctggcagtcggcggagggaaggcatcagaaagtgcgccccccccccctggcgcttcctccctcgctgctcgtcctgactgactgactgactgacccctgtttggccgtcttctctcgcagagggcaagtagatgcccgccctagaccctctctctttcgctcgtccacttcgttatcactcgccctgtggtccgccctcttttttcttccttccacgatctcggctcgttataccaagagttcctctcgccctgtcgtctcgccttgccctgcctcgcctctgttcccgccgcacgctgtctgctgccgtcaacgtcacttctcgcgcgggccgttgtgtgtgcggagtctgaactcacgcccgccgcgctggccctcgcgcgcgccgacccctccgagccggcgccatccaacgaccgcctctgcacctgtcctcgcctcctcttccggtgcgtacactcgagagccctgctgggatataggaggatagagggatcggggagctgcctgagctagaggcggagggccgacagctgacagcccgctctctctatccgctgcacctgtcatcgaacgctcctctcgcgctcggcccctcccgccccggaccatctcggttgcgcttgccttcgacctggccttcagcctgcctctccttctccccttccccccttctccctcctttagaccttcaagatgacgactgtcgacgagaagatgatgtccggccacgttggacacctgtgcgtctattctcttgtcgttcgaccgacgagcggcagagcccgggcgtggtgctccttgatgaggctcccagggtgtcgacacccgcccgacgcctgctcgccttcccgccgtgtgcctttgtggtggttggcttctgcttcggacggcagaacatgtcagctgacacattctgctcgcccctcttttctcactcgtctgcgacgttctccgacacgcgctcctcccggctcgccttaaccacgtgttgctcgaccctcctctcctgccgcggttcaccctcctcagcacgcccgagcagcagaccgcgcttgagcagttccgggccaacattgtcgccgccggcctttgcccggtcgacccgctcgccccggaggttgtcaccaacggacctgggtgcgtgagcctcctcttgcggccgtcgtgtgggctagctcgcagaaggacggggtgagaggacgccccattccatcgtcgagcggtagtgctgacgagtcacctctcacgtcctactttcctcgctcgtcccatccgcccgcccgaccgtgctgcgcctgctgcttcggcccaaccacagctacaaccgctacgacgacgccacgctcctccgcttcctgcgcgcgcgcaagtttgacctcgtcaaggcgcaggagatgtggaagacgaacgaggagtggcgcaagtcgtacgggaccgaccagctctggaagacgtttgactacccgaccggcgaggagaaggcaacgatcaacaagtactacccgcagtactaccacaagtgcgacaaggacggccggccggtctatgtcgagattctcggccagctcgacatgaacaagctctttgcggcgacgacgcaggagcgcatgatcaagtgcctcgtctacgagtacgagaagttcctccgcgagcggctcccagcgtgcgcggccgcgaccggcaaccaagttgaaacgagctgcacgatcctcgacctcaacaacgttggcctcagcaacttttacaaggtcaagggttacgtcggcgaggcctcgagcatcggccagaactactgtcggtctcgcttcatctctctcgcgcccctcccaggccacggcctgacccacttatgccgcagatcccgagacgatgggccgcttcttcatcgtcaactcgccctacctcttctcgggcgtctggtcgctcatcaagccctggctcgacgaggtcaccgtcaagaaaatttcgatcccgggccgcgactggaagacccagctgctcgcccagatcccggccgagaacctcgaggtccgcttcggcggcaagagcaccgacccaagcacgtccgacgccggaccctggaacaccgaggccggcaagcagggtgcgcaccctgggcctagcaccgtcgcagcctgaccgctgacggttcaccttcacctcgcaccatcagccatcgccgctgtcaaccagcagttccagaaggcgtaaaggctgcccgatccttctcgctttccgcttcatctgaccgcccgcacctagacagccctgcgccttctcccttcgagtgccccctaccctaccttctcctacctgctctgtgaaaagtctgccgctcggccagataggcaccttgtaaacccggctccagatctcatggcccttgcacgacaagcggtacgagggagcgggttgcatcgcaaaaggaaagaatggcatggctgagtgtcaggccctcctcgtccgcctacttgaggcggcgcgacgaggccccgccggccttcttgtacgtcttgccggtgccgagactcgcgcgaccgagggatgaggtgccgacgtccgactgagccgagctctgaagggggccggcaatagcgtatcagcgcacgaggccagctcgtgccatcgaaagacagctaccgaccctcagcttcttggccaacggcggcttgtcgtctccggatcgagttgttgcgggcgccgaggccgctggagaggcgggccgcttacccgtgctgaccgccgctttgccgagcgaggacgactctaccggaatggtgtcggacgacttgggcacaagactctcgacggcgacttcctgtccgtcatcgtcgtcgtcgtcgtcgtcgctgtcattgagcgagctgcagggtcagctttcgactgcatcgacacaagcgtgatgtagacgtacagcgcagtgagacgacccgctgaagtcgcccggccgaggttggggccgttagcctcggtcgaggcggagttggtgcgcgactcgacgatcgcgacattgaccgagccctcggcgacctggagacgttaatcgaaaatcagcacgagagacatcgaaactcagcgcagaagagcacaagaggaagcacgatgcgacgctggtcgggcacgcttgatggcgttgacgactgatccagcgcattatcttcgatgaggtcgcgcgtcttgccggagcccgagcgggcgagcctcagttgaccgagcggtaaggggttcagtgacgacaagacagagggtagggactttcaggctcgactcactgcttggtccactgcttctcgagcaacgccttttcctcgcgcatgccaccgatcgtgcgctccgcccgcctgagcttgttctcaaggtcgacctgctgcttaatattgacgtcttcgatcgtcttggtgaggttcttgatgaagccctgctcgtccgggtcgagctcgttggagcggtaccgttcggcgatggtcttgcgctggctgtcgaggcgctgcgttgagcacgacaagctggcatgcttgacccgcagctcgacaacctcgggcgtgatcttatccagcgcctcctgcgttgccttcagcttggtccgaagctgagaggcttcctggaggaatgaaataatgagatggtcagcgcaagagtgggcgcgtcgtccctcgaatcgcaagggtggcgcacctcgtttgccgcagcgatcttctttgccttctcgcggagctcagcgagctccatcgttgactgcgatctatagcgtgtcagcgacagaactctgtcatcctcagagagcagcagccgcaccagatgtcgctcctcacggacggcggcctcctgctcggagagctgggcctggagccgagcgacggcctcctcgcggccaactcggtcccctgcgatctggcgctcaagttcggacacctgggcctgagtgagtgaagggagtctcgacagtcagtcggtatccaggccattcgtctcgatcgaaaccgacctcgcgctcctcgacgtttgcccgggtcgcgatgagttcgccctcgatcgtttcgatccgggccgtcagaatggcgatctcggcctgcttgtctccggaagcctgctccgcgctggaaagggtcaaaggaagagggcggtctcagctcgatcagttgcgaaactggtacggaaagagaacaggcgaaacaggcggccgcacctttgcttgaggaggtcgtccgagcgggttacctgcatctggagcgtgtcgatccgagaacgtgcttcggtgagtgcgactctcagctcggacatcttcttgcgctcgacctcgagcgtcgctcctgactgcttcaccgccgcgtccgccagctgcttggcctgctctgcgaggccggcggccgtcgtcgcctgctgcgcttcgagacgggcgtccttgagcctgagcgatccaagagtcagtcctggcagcgaggctgaggaggacgagaacaagagtcagacgcactgctcggccagagccagccgaccgcccttctcttctccgagcgcgacctgcgtagcgaccagccgtgactcgatcaccgcgagctgctgacatgcgtcttctgcgttgcgtgcggcccgagcaccatccagttcggcaacctcgagtcggtgccggagcccgtcggcttcgtccttggcttgcatgagggcctgccggtcgagggcgagatcgccgtccttgcgcgcagcatcagcctgcgcggcagcgacactgagaagatggtggaggtcagcgccgcgtctcgcagtctgagggcgcgacagaacgcacgcctctttcagctgaccgatctggctctcgagcacgacggcctgaagtcgagtcgattgggcctccgagctgagcggcagaagcaacgtcaggatctgcgctgagcgaaggggtgctctgcgaggggcgcacctgagctctgcgagcttttcgtctggatgccaccgcagatgatgagcctcgggcgctaattcgcgaggaggagcgagttcacgcaccctttgccttgatgatagcgtccttgctcgcgtcccggccctcgagctcctggacccgcgcggtgcgctcggcaagatcaccgaccttaacgccgagctcgcgcttgaggagctcaaccgtctcggccgagctctgcgcgcgctctttggccgactcgaggctctcgtgcagcggtccgacagcgtcttgcagcttgtcccgcatcgcgtcgaaccagttgtcggtcgggctgaagtaatcgtcgaggcctgcacagacttttgtcagcaatcgtttgaccaaaagatgatcagagtttactcacgcgacctatggccgccgacgtcgctcttgagctcgagcacctcgtcgaggagcaggttgtgcgacttgttgaagtgctcccgggcagcgcgcgcctcgcgctggaccgtctctctgccgacccaaacagaagtggtcagcctctgccgccaatgtgttgggggcaagcgactctagcgcgcacaggaggcactcaacgctcttggctctgttgaagaggggcgactcggtcagcgaaagggtagcctcggcgagtcagaagaccagccacagactttgacgctgtctccttgactgccgccttcattgtcttgagcgagtgcttgagcgttgagttctcggccgtctgcagcgtgagcaagtcagtctgccgccgagaaaggatcaatgacgacagacattgcgcacgagcgtcttgatgacctcggccttctgatcagcctgccgaagggccgcctggatgaggccctgcaggtcgtctgccggtgcgccactcgagtcgaggcgctcggcatcactgcgcgaccgccgacgcttgacaccgcccgacgccgacctcaagaccagtccggccacggccggcgtgagcgatgcggccgactggccaggtccagtgccagaggatccgcgcgagaggactcgtacagccgagccttctgccgcctcgaggatctcgccgtcgccaacggcagactcggtacgtgcgctcgcattcgagccgccggagccggtgcgggaggccgacttggtcggcttgttcttgcgcggtctcgcgtcgtgagatgtcgatgcgagagggtcgtcggtcgaaggtggaccgggactgatctgccggccagagtcgaacgggtctggcgggacgtcgggcagtggctcgtcaagagccgtctcgacgagcataccggtgccgtcaacaggctgcccctgcgacgcctcctcttcgtcctcctccgcgacaggactcatccgccctccatcgccccttgcccagccgatcggcgacactttgttgacgaggtcgcgagcggcctggaagtcctcgtcgaggtccaggacgatggttgacgaagagagacgggaggacgcgttctgtggccgaaggtcgacgagaggagcctctagacgatgaacggcatcgactccctcgccaccctctccgtctaggctctggccggccaccgcggagctcagcgactgttcgccctctgttgcggccttgcggtgggtcgacttgctgcgtggcgcggtcgccggtgcgacggggtgcaggttgggcggggtgtatgcgcgcccgtacgacgaggatgggccggctgcggcaaagaagtctggtgagacgactcgcggaggcggtccggcgccagcgaggatgttgacacggcctttgctcggcggcggtcggacaggagctggcctgatgccggtgttgaccggcaaggggtgcggcacgccctcctcgcccgaggtcgaccccggggctgacggcatcggcgctgctctcggtcgactgtcggccttggcagcccatgcgctgctctgagcttcgacgcctggccggcgctccttttcctggcttgcggcggctgccgacatgccccgctgcgagagcgccccgaagccgctgccggtgctgcggccgacgaagcgtgagaagctgaactcggctgcagcctgcaactggaggtcaaccgagcgcgcagacgtgccgagcggaggcgagccggtctgaggttgggtggtgcgagcggtggctggagtcatcgatggtgggctgagaagaccaggccgagaggaggagagaggtcttcagcctgcacgcccacgctcgggaggcacgataggcataccggtcgtcgtccgcctcggaggcgcgctcgcggctctgcatgatggcttgtgcgaggtcagctcgtttgagggctgtggcgcgagagagtgcgtgctggaggtggtagtcggtggagggaggccagagtggcgcgcgcggtgatagcctcgcctgctggagtaggcagcgacccgtcagctcgacgtgccatcggtcagggcgtgcagtgaagctttgcgcacctgagctagctcgtcggtcggaccgggggacagtcaggcgggttgcggctggcggtcggagcggcggcgcgggcgctcgagaggagggacgcgtcggagtcgcgtcgtccccttggccgacgtcctcttgctgcctcgacgccgattcgaccaagtcagcccaccagatcgttagcaaaggtcagctggtgatcgctcggcgcttaccttgcgcgaggaagtcagacggacatgtatcaaggggtcgagacatagggctacaggcttgtgttgcgtgcgggccaggggagcgagggcgagagaagagacgtggtcgatcgtgtgctgagggttttgcgagacgagggtgagatcgagagggccaatgaaacgttcgtgtgtgcggggagacgggcgtgcttgtcgagtgtggttgggcgggcggcgaggggtcgggcagctacttctcgaagcgcgagctgccttcggccttcttgccgtcgagccggcgctggagctcgtcgaccttcttgctgagctttttctacaacaggaggtgagcgtttgggggcggtcagcgccagacaaagctcgttcaagagctgcagacgaggacgacgcacaatctcgttgatgatggtcgcctggtcgccgagcgtcgcgtccgggaagacctcgacgagctcggcaaacgactttttgcagagctggtggccctcagcgttgtccgactcggggtcctcgacggccgggtcgccctcggcctcctggttgctctcggggaagagctcgaggaagcggcgcgagtgctcgacctgcgactcgtagagggcaatgaccgcgagcgggacggcaaacagcacgctcatgacgtagacattgagcttcaaaagggaaggggaaagtcagctggcgagcgcgcatgcagccggattgggagcgaggcggcagacacacctttgtgtactgctttggcgtgagcacccactcgaacggcgcgacgagcagggcctcgatcaggttgaaggggctggggtagacaaacgagtcgggcgcgcggatcatgctgatggccttgtagcctgcgcacggggcgacgaggttggtgggtcagccgctgcgtgaggacgtcacgaaagattagagacgcactaaagtggcaaaggtactgattggtcgcgtcctcggcaatgtccgagtaggcggtgccaaagagggcgatgagaatgttgagcaggatgatgatcgtgaggaacgaccaggcgtagtaaatgatgaggccgaacggcgggctaaaatttttagccgtctggtcaaagtcgggcgagccgagaagcgcctggaggagaatgttgatgatgccccacgggtccgagagctcggtgtcggccgagtcgagcgcgagcatactctggacaaagccgagcgccatgatggcgagcagaaggaagaagatgagggtctcgcggagcatccggaagacgactacctgcatcgttcccacaaccttccagccgtcaaagatggtaatgagcttgagccagaggactgcaaaaagaggtcgatcgtgatcagcaacgcaggcagcgtggagctcaaccgcgactgagacgcacgcggggcgacgcaggacaggacttgaaaggaccggagccggtagtacgagctcggggcgtcgtccgtctcccagacgccgcggaaacggagggcaagggccgtgagcaggagtccgtcggtgatgagggcgttgatcgaccagaagtcgaacgaggcaaggacggccgacgacagccggaggttcttccaaagcttgacgacttcctcggtcatctgtgaggcagccatgatgtagagggcgacctcccagccgtcaagattgtgcgctgggtcgcggacagagttgagcggcgaggcaacggcggccgtgtaaacggcgagaaaggcgatccacgtcatctggcggactgcggggcgagagagaggcggttaaacagacagcgctcatgtggttgccgccatcgaccgcagacgcacagatgttctggtagcgcgggacgccgagccgctgcgggttgaagtgggtcgcgaacttgctgccaaagccggcgccgtgctgatgcttgcggtcgtactcgacatagtcgatgtcgttgttctcattgttgcgctggacccactcgcccttccagagcgaggagacgacgtgctgggcctacgagcgtcgggtgggggtctgaatcagtgcacgcgcttgggtaaggcggctgatgcgcagcaacacacctcggtcgagctcaggaactggaggcagccctggtcgatcgccgactcgagggccgagatcggagccctatcgcaaggccagaccagacatgtcagccagcgtcgctatcggagcagcagcagcagcagcggtagaggggcgacggacgacttgtcgccgtcgcgctcctggtgttggtaacgcgacgacatgatggtctgaagcatgtcggccggcgtctggtggacgatgcgccgagcgatcatctcacagcaggccgcccgcgagatgttctcgtcatagtcggtcgggtagagccgggcatcgctggagacgggttggtcgggccggggtcagccgtctgttggacgcggggagccgtcgggaacgaggcgcttaccggacaaagctggcgcgggccatcagaagcgcgtaagggacggcgttggcaaagtcaccgccggccagggcaaaggccttgacgaccgcgggcgagacgaccgagctcgtcggggctgtgatgagctacagggtcgaggcggcaggcaaggttgcgtcaggagccctggcgacggcgcgagcggacggagtagagggaaacgcacgtcgacgtcgacctcgataggcagaagcttcagcgtcatggcccggatccgacggatgagctctggcgcgaagagagagagagagagagagcaagagatcagcgacaggattcgcagagacggggcagcgtagggtgcgacaggcccaaggtcggggacgcactcgtcatgtcggacggctccgggtgcaacgagtgaatgctcagcagcgagtgcatgtcggacgcgatggaggtctcctcggccatgctgggcaaaggctgctgaagggttcgagatgaaagtagggaagggtagctggcagagggaggaacgcagtgacgctgcgagaggcggcggcggcggcggcggcgcgcgaaagagagcccgcgcgggagggcctttcttttttctggccgcccagccagcaatttgggcgagcctgcccgcgccaggcgcgcagagctgccacctttggcgagctgcttcgagccagccttcaaccaccgatccgacctttcctctccttctccttcccccttcgtctcccctacgcaagcatgggtggaatgggccgtcagggcgctcgcggaggtgcgcatgctctggctgagagctctcaggccgctctctcgccccaagctgaccttctctcgcccgcccgcagcgctcctcacgtcgaacctgccgcagctacagaacctcatcaagcgcgacccggccggctaccgggatgagtttatgcagcagtggaaccactacgagtcgatgcgccggctctttgagctcaacccggacgaggagggcgcccgcttccgcgaggtcatcaccttcatttcgcaggcacgtcccctcccgaacgcgcgcgcgcacctggccctctttccgagtcaggagtcctgaccttcgcatgccttttaatgcgtcgctatagctctgccagagctacccgaaggagaccaaggaatttccgtcgcacctgtcggccctcctgctcgagcaccacaacacgctctcgcccgacacgcgcaagtcgatcgtccaaaacctcgtcatgctccgcaataaggaggtcatcccgtcgattgagtacgtcaggcgcgttcagacattgtccgtgcttgtgggctgatcgccggcacccactgtccttaggcttctccggacgctcttccccttgctgtcgatcctgacgtcgagcacgctgcgctcgtcgatccgcaagacgattcttaccgacattaagacggccaacgccaagaccaagaaccacaagctgaaccggatggtccaggccctgctttttggcatggtcgagcgcggaatgggcgccgatgccgagggcagcaaggtcaaggggaagggcaaggttgaggccaagggcggcgaggccatgtgggccgtcgtcctcgtcaaggagctctggcgcaagggcatttggaacgaccccaagtcggtcgccatcgtcgccctcgcgtgcaaccaccccaacaccaaggtccagtcggccgcaatccacttcttcctcgggagcgagaacgaggaccaggacgactcagacgaggaggaggacgaggtcaattatcttacgccgctgcgcttgcgctggaagggctcgcttgctgaaccgcctcttctgtgccgctacagggccccaacctgcgcaagctccagcaccagcggacgatcaacaagaagacaaagggccgcgacgcccagatgaagcggttgcacaaggtttcggtcgacaagcgcaaggacaaggccgacaaggccaacgtccaggtcaactttccggcactccagctgctcaacgacccccagtcgtttggcgaaaagctctacgagggcatgagccgccacgacaagcactacgcgctcgagcacaaggtgctgatcatgcagctcctctcgcgcgtcatgggcgcccacaagctctgcatcctcggcttctactcgtacatcatcaagtaccttacctaccaccagctcctcatcacccttattctcgtctcgctcgcccagtcggtccacgagctcactccgccggacgtcctgacgcccgtcgtccgcaagattgcggccgagtttgtccacccgggcgtcggatccgaggttgttgccgcgggcatcaatgcgatccgcgaggtctgccgccggcagccgtggtgcatggaggaggacctgctcggcgacctgatcgaataccgcaagtcgaaggacaagggcgtcgtcaccgcctcgcgcggcctgctccagctcttccgcgaggtcaaccccggcctgctcaagcggcgcgagcggggcaaggcggcgacgatgggcctcacctcggaccaggtgcccgagtacggccacgcccgggcggccgagggcatcgacggcctcgacctgctcgaggagcacctcgccaagcaggaggctggcgaggacaacgacgccaacggctgggacgattgggagcaggaggcttcggacgacgactcggatggctcgggcgagtggaacaacgtctactcggacgaggaccaggatatcgacatttccgactcggacgacgatgccgagacgcagcagacgcggcgcgagaagaagcgcgagcagcaggagaagcgcaaaaaggctctcgcgggcgtcctcgaggaggaccaggctaagcctgccgtcgccgccgaggacgacgctgaggacagcgacgagaaggctgaggctgaggacgaggacgaggacgaggacgaggcggagggcgaggacgacgagacggccgccgacgccgccagcacggccggcgagctcaccgctgcctcgatgtcgaagcttgcgaccgagcgtgtgcgtcccctccatgtcagccttctctccccgcgcagacgctgacgctcgctcttaccccctccctgcagattctcacgcccgccgactttgcgctcatcaacacgctccggatccaggccgcgaccgaggcggccgcgtcgggcggtggctcgggcgccaagcgcaagctggcgatgctcgaggcccagaagaaggccaacaacacggccggcggcgccggcggcgacggcgacgacgtcttcctcggcgagggcgacatcctcggcccgcgcaagaaggtcaaggagaactatgacgagcgcatggcccgcattgccgagggtcgcgagggccgcgacaagtttggctcgtccaagggcaagaagaagcaggaggtctactcgtcgtcgtccaacaaggagaagcgcaagaccaagccgatcatgctcgccatccagtgcgtcctcctcgcttcgacccacgtttgtgcgcgttcgtcgctgaccccttgcctcctcctcgccccagctcgcgtcgcgtcgtcgagaagaagaagcagtcgctgcgcgagaagcagcaggccctgcgcgcgcacgtcgagaagcagaagagtgcgtccctccttgtcacctgggttcgccacttgggccgatcgctgacctcaccgtcctccctcagagttccgcaagtagaccccccccgctcagctttccttcttctcatctcggtccatctcatttttcctttacacgcgcacctccctttccactccccttctcccgcccatatcgcatggactgccgtacgcacacttaaagaggccgcttcaggatgcgcgcagggtctgcgagtggaggacctgtcgaaacttgcctgagctcttgtccgactggcgtgctcctcgaccggtcccgccgctgctcctgctcgccaggggccaacgtcagcagtgtctctgatccagggcgagcgaagccgcaagcggtcgtttcctttttttttttctcgcccgcgtgcgcgcgcgcgccgacgcggcgggccgctgtcttcgctcccctcggcggcggcgtcgaagctcgctcgaccggctctcgacaggacccccccgaccaccgaccgcctcgcctcactccctcagcagcctcctcaaggagaagcccatcttcgaccgactggcatcggctcaagatcctctccctgtccaccgacttccgccctcgtctgccgcctgctgcaccctccaggtctcgggcaggcacgcagcaccaggtctgaccgacctcctgcaccgacctcccgacggagcccgtcatggcatccaccccgccgccttcgaccctctcgccacccatccgtctcgccagctcgacgccagatccgctcctctcctcacctgacacgcccctcccacccttcacgcccggctcgagctcccggatggcgtccatccagcaggcgggcggccgaccgcccccgtcgccctcgcactacaagtcgtcggctcggccgatccgcgtgctcgacaacctccatcggcgcgggtcggccagcgacgacgagggagagatggacgtcgaggacgacaagagcctcggcggcctcgccccgggcttctcgtacggctcggcaggccgggcagctcgcgctcgcagcccgtcgtcgttagcatcgagagcacacgccctctcgctccggctcgacacgcctctcgtgctgagccaagcatcgtccgccgcagcctcttctgcgctgccgggctcttcgctgtcgatcgtcgtgccgtcagcgggccaggcagggccgatggacctcgtcctcgacgaggaggatgagccagtggagccggaggacgacgacgacgcccggctcgcgcccctgccgacgttagacgaggtcgctgcgcttgaggagcgcctgcgcgagctcaacgtcgagtacggcctcgaggacgaggagggcgacgacgagcaccgcgagatggtcggcctccgccagatctacactgccgtgcgtcgagcgacctcctgagactatcgtcacgaccgggtcggacactcgctcactcttaccctggaccctcacagacggcgcccttacttccgaagctggagtcggccgccaacgccaggacgaagctcgacgcgcaggcggccgagatagcctcgcttcagcgcatcatcgacgtccaaggcgaactcgcacgcaaggcgtctgaggagcagaggtgcgccttggtttacttctgcgacggcctcacctcccctctgacggcctgctctccacctgattgctagggccatgtttgacgtcgagcgcgacggctggaaggccgagacgcaggtcttgctgtccaagatcaaggcaagtgtgagctctggctctagccagatctgggtcggcggggcgaacgagcagccgcaacagcagcagccgaagcagaaacaggccggaccggcgcacaagaaggagagcggcttcgagcagctcgacacggtcgggcccgaggactacaataagctgctcaagcagtggatggtgcgtcggcgtgcgaggggcgatgtctgccgagtgctctggcgggctaactttggtcttgtctacgcgctggcctcgcaggatctccaagccgagcaccgcaagagcatcgccgagaagactgcgatgacctacaaggtgcgctcttgcagcattcagggccactggtcaaggaacaggacgactgacgactgtcgtctccctcgctgccagatgcgcaaccacgagagtcagctcaagacgctcacgcaagagctccacttcctccggccgattgcgatgaacggccggcgcccggcccagtcgcccgcgcaggtcaagtcgtcgccgccgccacgttcgcacggcctgccgccaatcgtcagcccaccgcagccgcagtcgcgccggcagacgctcggcgacgcgcggtcagagcacctgctgcttgctgctcgccgcttgcggacgctgcgcgagaagaatcccgagatcgggctcatcacggcagctcactacacttacgcctcgctccaagtgccggatccgaacgcggcgctcgagccgtatacggaaggcgcgtcagagcttgacgacgaggatggtgcaaaggaccggacgccgcgcggcaagatccggcccaagggcaagaaggctgcgagcggctcgatggcgccgccaaagacgcccatcacgacctcgatcaagggcaagggccgacgcaaggacgatggcgccgtccagcgcacaccgggtggttccctcgggacgcccggtcggggctttgaggagctgctcgctgccgcgcagagcctgcaacacccgacgcacccgacgtcgacgctgcgagacgcctatgcggagccgccggccaactcgtcgactccgaccggtccgccagaatctccgaaacggcgccgagtcggcagtgctggcgctggctgggttcccggtgcgagcacgatcggcccgtcaggaggcgaaggaggcctgcacacctcggccctcgacctgctggcgctcgcgagctcgcacgacccggcgtcacccgcgccgtcatcatcggcccgtctcggcggcctgctcggctctggagggtccgacaacgacgtcgggtcggacagcggccggtcggcaggctcggcctcgcgcggcctcgagccggcctttgcactccggacggatgtcggcgacggctttggtcactcgtttatcggatcggatccgccggtcgctggcccttcaacgacgccgagtaacgcgcggctgccgcctgacggctcgagcccctacctcgcatcccgtacgccgtcggccctcccgcagcgggtcaaggaggagtttgccggctttgcgagcgaagcgggcagccagtcgccgcctgcgatcggcgtcgcgccgttcgacagtgccacgaacgccgtccctgcgcggagagttcggagcccttacctcaagtggagtccagacgaggacgagctgctggcgcgtggcgtcgccaagtatgggcagaagtggtgcgtcgaaaagaactgcctcggggtcgacgactctgctgacacctcttcgtcactcgcagggaccttgtctcaaaggccgtcccgacccggagctatcaccagtgccgccagcgttggcttcgcaagctcggtgcgtcttgctgtcatgctcgcacttggaccagggctgactctcccctctcctcccggtcgatgcgtcaggcatgttcgaccacaagtcggcggccgtcacgcaggcggcggccgggtccgcaaagcatccgtcatcagcagcgccgccagagtcgccctcgcgacgcaagggtggtggcggcgttgtcgcgtccgacgggccgtcgacctccgagtcggcctcggcagacagcaactgaacacttcgaccccctcgaccgttcgctttgttccctcctgccgcaccctccttacaatcgtccgtcgcagacactcgcacgcatcgccctttcctttgttcatctcgccgcagcgcagactgcacaaccctcgcacctgctccccgtcgcgcctacttcccagctacctgtccttcgatcgtgtgacctaatgtttcatctccgtctgtcgaagccagtcccactgctgtcattgccgcccggacccagtctgaggctgctgtcgactcgacgtctgctgggcgtcgtgactaccgcactcgcgcgagcaagggcctgtcatggacagaagagaccagctcatgactgcccaccaccacccgacgacgacgtccgaggcttcttcgccggcggctcggacgtgctcgacttgcgactcgacgtgtccgccgccgggcgctttgcctgaccttctccactagcggtaggggtaggcggggacgagtcgctcgcggcgtcatcggcggcgtcggcggcggcgtccgctgggggcacgctcgtagccgactggaagggcttggtcggcgaacgcgagcgtgtagaccggcgggacagaattggtggctcgtccttcactgcgtcttccttctcgggttcagacagaggcgacgtctcgcgctgcccgtcgtcgtcgacctccaccggatccatgacgacgtccgagtcgaccgctcccccgccgaggacagcctcgacgttgagcatctcagagtcgacgccttcgctctgcgggtcggtgtctgcgagcggcgccggctcctcgggggcgggcgagccgttggcagtcgtcgtcgtcgtcattgttggtgttggcgctttggaggcgggtgcggtccggcgcgcgcggtcctcgtcctcgtcctcatcgtcctcgtcggcccgttcgacagcgggcgtcgtcggcttcgaggcggctccttccgagccctcgcctgcagccggcgtcggggcctgcgagcctgccggaccgagcggcgcaccaaccgacgtctcgtcgccctcctccccctccccctcctccttcttctcagcctcctcctcctccactggcggcaccaactcccttaggcccttcaactcttccagcaagcccgcaaacgccctcttccgcccttcgagcgtcgccctcacgccctccctccggcccttggccctcgcccgcgcctcgtgcagccccgccagctcgcgctcgagcgcggcccgctcgccgacggcaaggacagagcgcgcgagcgtgtcgtaggcgagcttgcgctcgcgcgtttgttcggccgaggagagggctgagcgaagggcgacgagctcgtgctggagcgaggccttgttggcctctgtgcaggcgagtggaaagcgaggcatcaagcgtcagcatcgaccaccacctcctcctccccctcatcgtgaaaggctcgagtgagggaaacgcacccatttgtctccctttggcctcgtacttcccgcgcatgcgcgtctccatgcgctcaacgacggccaccttgcggacgccgagctcgacctccctcagctgcgcagagaagacgctccagacctctgccgcctgagcggcctcgtcgaagggagcggacggcccggccagcgttggcgcgtcgccatcgccgtcggcatcggcagcggaggaggaggaggtggtagtggaggcgaggatctgggcgatctgccggatacacttccggagcgggagctcgacattgctgagcttcttctggatgagctcgtctgcgtgcgtgcgtgcgtacgtgcggcgggcggtgggcgagggtgtcagcaagagcagggagttggctcggtcgatcagggaaggggtcgctagtgaccttcttggtctatgctgaggaccaggccgggtgggagggcggccatggcgagatgcgagagggtcacggtcgggagggcagccggaagaggaggggggagaggggcaagcccgggcgggagtcaacgcgtcagagcaccgcgcgctttcgatcgtgattagatccctcgcttggaccgacttctttcaatctcgcactctgcacagcatgcccttcaattacgctgatagtcatgatggatacagtgcgccgtctgaaacagctcgggcagagtaacgccgtctcaggggcgcgaggcgatgcccgcggcgaggccgttcgcgtgtgatagaggaccataacgccgctttggaagcctggaggtctgcccaacgggcttcttgaccaacgctcgccggcatgaggaccagctcgtgcatcttccggtcaaagcgccgtcggccggccgaccacaagcgccgtcgtccctagcctggccaaagactgcacgttgaacgagatcgccagacgagcgtggctgatgccgaggctctagccgacgaagcggtagagcgagctgccgatgaagtactgctcgacggggtgcaaaggcgtgcgcagacacgacatgaggagtgtcagctcgggcgtcggaactcgttcagagccaagaacggcaagagagacgacgcaccttgacgccctcggcaccgtcgtccggcacaaggacaaagctcgcatggaacgccctcggcaggcgctcgacgtcggcccggtccttgtacttcttgagctcggtcgggcccatcggcggaaggcgctgcttctcggccggcagggccgggtcggtcgacgggttgaagtagatgacggagccggtgacgaggacctgcatcggtgctggcgctggaggcgaagtgggccgagaagaggtcggataagtcaatgatgctggggcgcgcaaagtggcggcgcaacgccatgcgagcggagagaggggacgcacagacgccgaggaccgggtggacgtcgatcgtctggacctcgtgcctcgagagcggcagcttggcgaggtaggccgcgaggacgtcggccccaagtggcgtgccgttccagagcgtcgtcgacgtcggccggtggaggaccgggaggaactggcgggcgaggaggacgagcgacgagggaggtcagctttgggtgagggctggtgccgcgccgcaccgcgatggggacgcacgcctgaccgctcctcagagtcgagcgccttgaagtagatccggacaaagctggagggaggacagggcaggtgtaggtcggggcgaggtcggggtcagacaggcgaggcgaagtgctcggacgggaggctcgactcaaagcccggacgcactctcgggcgccccggcaggcaatgtccatcgtcgttacgtcggccatggtcgggcgagctgctgttgggcggcgacagctgggtaggaagggtgagagagacggtcgggcgaggctggctagcaggtgacggtcggcggggcgaaagctcgagccggcgaggaggcgccggcgcagtcgactgcagtcgcgatcaacaaagtagctcgctcaacttgcccgcagagtggaactgagagggcgccgatggaagtcgggcgagcgggcgtgtactctgcgcccgcttttatacagctgcatccgagagactgattggaagctgacgaacccatcgcagggtgaggggagggcagcggcacactctcccagtagtcggagtttccgggcggagagaagaatgcggtcgcttgaagtcctgcctcgctcgaacggccgcgaacatgcggcccttcgtgcagacgacagaggctgctgctgctgctttggcagacaccctgtttgctcgacgggcagctgaagtgttctcatttctacttcacggaggcgggaacagatgggcgtgagcgtgggcgggcagctgctcgctcagcgtggggatcgaggttgatgcaggtcgagagggtcgttccctgctctgccagcctgaacgacctgctctctctcgccctcttcgacccgtccctctcagtaccgtctcccttctcgcctcctcttcctctgccgctcctgccctctcccaccaggatgtctgcccagttcgtcaagctcagtatattcggaaccgtgcgtccctttatctcgtctggcggaacgaacgagaacctccaaccctcgcaagagctctctctgggcctctcggccaaccgaaggccaggctgccgtcgcgagggccgatctcgccccggctcgcctctggcaacagctcgctgacagacacctgcctgccttccttaccacctgctccgcggtcgcctcccgccgtcgtccgctcacccgtcgtcgcctaccgccgccgccgtcccgccgcgaacccacatccgggtttcgctctcgccaccgcgctcctctctcgcatctcctccgcgcgccttctgccgcctccctcgccgccgtgcctttcgctctggcttcgcccacccaggtcttcgaggtcacgtcacgatatgttgacctgtgcgtagggaacccgcgtcttcttgcgggcgaggggcgaggggggacctctggccttgccgcccgagagctcttgctttcgccgccgggaatgcagctccgggctgtctggcgcgcggcgcgcggcgcgaaagctgaccaccgagcctcccacctgcttgcctcgcctcgccgcctcgtctcgactcatgcagcaaccccgtcggtgcgtcctgcgacttttcctgatgcgctcttgcctcgaaaccttgaggttgactggcttttgaccgcgattcttttgaccgcgattcttccaggcatgggcgccttcggcctcgtctggtcggtcctttcccttcgagctctctcagagac
